(19) United States
(12) Patent Application Publication
(10) Pub. No.: US 2023/0313187 A1
(43) Pub. Date: Oct. 5, 2023

(54) MODIFICATIONS OF MAMMALIAN CELLS USING ARTIFICIAL MICRO-RNA TO ALTER THEIR PROPERTIES AND THE COMPOSITIONS OF THEIR PRODUCTS

(71) Applicant: DNA TWOPOINTO INC., NEWARK, CA (US)

(72) Inventors: Jeremy MINSHULL, Los Altos, CA (US); Maggie LEE, San Jose, CA (US); Varsha SITARAMAN, San Mateo, CA (US); Oren BESKE, Aromas, CA (US); Ferenc BOLDOG, Newark, CA (US)

(73) Assignee: DNA TWOPOINTO INC., NEWARK, CA (US)

(21) Appl. No.: 18/044,057

(22) PCT Filed: Sep. 3, 2021
(86) PCT No.: PCT/US2021/049074

§ 371 Date: Mar. 3, 2023

Related U.S. Application Data
(60) Provisional application No. 63/074,803, filed on Sep. 4, 2020.
(60) Provisional application No. 63/111,139, filed on Nov. 9, 2020.

(51) Int. Cl. C12N 15/113; C12N 15/10

(52) U.S. Cl. CPC C12N 15/113; C12N 15/102; C12N 2310/141; C12N 2310/122

(57) ABSTRACT

The present invention provides methods and compositions for stable genetic modification of cultured mammalian cells. The genetic modifications can be used to produce cultured mammalian cells for therapeutic or diagnostic purposes.

### CROSS REFERENCE TO RELATED APPLICATIONS

[0001] The present application claims the benefit of U.S. 63/074,803 filed Sep. 4, 2020, and U.S. 63/111,139 filed Nov. 9, 2020, incorporated by reference in their entirety for all purposes.

### REFERENCE TO A SEQUENCE LISTING

[0002] The application includes an electronic sequence listing in a file named 565103WO_ST25.TXT, created Sep. 3, 2021, and containing 911,970 bytes, which is hereby incorporated by reference in its entirety for all purposes.

### BACKGROUND OF THE INVENTION

[0003] Introduction of heterologous nucleic acids into mammalian cells can be used to modify their properties, and the properties of molecules that they produce. Genetically modifiable properties of cultured mammalian cells include the glycosylation of proteins secreted by the cultured mammalian cell, proteolytic processing of proteins produced by the cultured mammalian call, intracellular trafficking of proteins produced by the cell, growth properties of the cell including which nutrients must be provided to the cell exogenously, and viability and susceptibility of the cells to apoptosis under various stresses including expression of high levels of heterologous proteins.

[0004] Stable genetic modifications of mammalian cells can be made by integrating a heterologous polynucleotide into the genome of the cultured mammalian cell. Heterologous DNA may be introduced into cells in different ways: by transfecting with naked plasmid DNA, by packaging the DNA into viral particles used to infect the cultured mammalian cells, or by transfecting cells with a transposon and its corresponding transposase.

[0005] Non-viral vector systems, including plasmid DNA, often suffer from inefficient cellular delivery, cellular toxicity and limited duration of transgene expression due to the lack of genomic insertion and resulting degradation and/or dilution of the vector in transfected cell populations. Transgenes delivered by non-viral approaches often form long, repeated arrays (concatemers) that are targets for transcriptional silencing by heterochromatin formation.

[0006] Viral packaging generally imposes limits on the size of the DNA that can be inserted. There are also safety concerns regarding viral integration sites, and the costs and complexities of viral manufacture.

[0007] The expression levels of genes encoded on a polynucleotide integrated into the genome of a cell depend on the configuration of sequence elements within the polynucleotide. The efficiency of integration and thus the number of copies of the polynucleotide that are integrated into each genome, and the genomic loci where integration occurs also influence the expression levels of genes encoded on the polynucleotide. The efficiency with which a polynucleotide may be integrated into the genome of a target cell can often be increased by placing the polynucleotide into a transposon. Transposons comprise two ends that are recognized by a transposase. The transposase acts on the transposon to excise it from one DNA molecule and integrate it into another. The DNA between the two transposon ends is transposed by the transposase along with the transposon ends. Heterologous DNA flanked by a pair of transposon ends, such that it is recognized and transposed by a transposase is referred to herein as a synthetic transposon. Introduction of a synthetic transposon and a corresponding transposase into the nucleus of a eukaryotic cell may result in transposition of the transposon into the genome of the cell. Transposon/transposase gene delivery platforms have the potential to overcome the limitations of naked DNA and viral delivery. The piggyBac-like transposons are attractive because of their unlimited gene cargo capacity, but Mariner transposons such as Sleeping Beauty, or hAT transposons such as TcBuster also provide efficient methods for integrating heterologous DNA into mammalian cell genomes.

[0008] The properties of mammalian cells can be favorably modified by inhibiting genes endogenous to the mammalian cells. RNA interference methods may be used to inhibit endogenous mammalian cell genes in order to favorably modify the properties of the mammalian cells. RNA interference is a promising technology for inhibiting endogenous genes of mammalian cells. The techniques currently being used suffer from limitations that prevent reliable long-term inhibition of gene expression. One widely used technique is to treat immune cells with siRNA, either by transfection of the siRNA or by treatment with chemically modified siRNA. This is useful as an experimental technique to determine phenotypic effects of gene knock-down or gene knock-out. RNA is labile, however, so any effects of siRNA administered as RNA are transient. A second technique is to transfect in genes encoding shRNAs which are operably linked to a promoter transcribed by RNA polymerase III. This technique is frequently limited by the variable efficacy of individual shRNA molecules, as well as the highly variable rate of random integration. The variable rate of random integration can be solved using lentiviral vectors, but the variability of shRNA efficacy is still highly problematic (Anastasov et. al., 2009. J. Hematop 2, 9-19. “Efficient shRNA delivery into B and T lymphoma cells using lentiviral vector-mediated transfer”).

[0009] MicroRNAs (miRNAs) are naturally occurring RNAs that are transcribed from their genes by RNA polymerase II. MicroRNAs comprise intramolecular double-stranded RNA hairpins, which are processed by cellular enzymes to produce a “guide strand” that is complementary to one or more mRNA targets. The guide strand is physically associated with the RISC complex, and acts through the RISC complex to inhibit expression of the target mRNA. Artificial miRNAs (amiRNAs) can be designed by using a natural scaffold and adapting it to produce guide strands that inhibit targets other than the natural target. Artificial miRNAs can also be transcribed by RNA polymerase III (Snyder et. al., 2009. Nucl. Acids. Res 37 e127 doi:10.1093/nar/gkp657. “RNA polymerase III can drive polycistronic expression of functional interfering RNAs designed to resemble microRNAs”). The use of miRNA scaffolds can improve the processing of interfering RNAs, but variability in effectiveness remains a challenge. There is thus a need in the art for a robust RNA interference method for the inhibition of genes endogenous to mammalian cells in order to modify the properties of mammalian cells, or of the proteins or other compounds that mammalian cells produce.

[0010] In some cases, it is advantageous to be able to modulate the expression of a heterologous polynucleotide within a mammalian cell. This can often be done directly by operably linking an inducible promoter to the heterologous polynucleotide to be expressed. There are circumstances, however, when expression of the heterologous polynucleotide should be inducible in one cell but constitutive in another. An example is when it is desired to produce a virus encoding a toxic gene intended for delivery to a target cell. Although the gene should be expressed constitutively in the target cell, expression in the cell line that is used to package the virus risks killing the packaging cell.

### SUMMARY OF THE INVENTION

[0011] Disclosed herein are methods and compositions for introducing into mammalian cells polynucleotides comprising artificial microRNAs to inhibit expression of heterologous polynucleotides.

[0012] Methods for modifying the genomes of mammalian cells to inhibit expression of endogenous genes are described. Mammalian cells may include mammalian cells cultured for the production of expressed proteins. They may also include immune cells including lymphocytes such as T-cells and B-cells and natural killer cells (NK cells), T-helper cells, antigen-presenting cells, dendritic cells, neutrophils and macrophages.

[0013] RNA interference methods may be used to inhibit expression of endogenous mammalian cell genes in order to favorably modify the properties of the mammalian cells. Here we describe methods for improving the efficiency of RNA interference: (i) the gene expressing the interfering RNA (for example the shRNA or amiRNA gene) may be incorporated into a transposon, wherein one or more copies of the transposon are integrated into transcriptionally active regions of the mammalian cell genome, and (ii) the interfering RNA comprises two or more different guide strands that are complementary to two or more different sequences within the same mRNA target. Providing two or more guide strands complementary to different sequences within the same mRNA target, either in a lentiviral vector or a transposon vector substantially improves the reliability of RNA interference.

[0014] Methods for designing polynucleotides for the inhibition of genes expressed in mammalian cells are described. A preferred polynucleotide for the inhibition of a target gene (the “inhibitory polynucleotide”) comprises two or more different hairpin sequences that can be expressed in the target mammalian cell to produce two or more different RNA guide strand sequences, each of which is complementary to a different region of the target mRNA. The first (guide) sequence comprises between 19 and 22 contiguous bases that are complementary to the target mRNA and the second (guide) sequence comprises between 19 and 22 contiguous bases that are complementary to the target mRNA. The first and second guide strand sequences are different from each other but complementary to the same target mRNA. Optionally the polynucleotide comprises a third hairpin sequence expressible in the target mammalian cell to produce an RNA guide strand sequence comprising between 19 and 22 contiguous bases that are complementary to the target mRNA and the first, second and third guide strand sequences are different from each other. Each hairpin sequence in the inhibitory polynucleotide comprises a guide strand sequence and a complementary passenger strand sequence. Each guide strand sequence is separated from its corresponding passenger strand sequence by a sequence that, in the expressed RNA, forms an unpaired loop of between 5 and 35 bases. Each passenger strand sequence comprises at least 19 bases that are at least 78% identical to the reverse complement of its corresponding guide strand sequence (i.e. within those 19 bases it comprises no more than 4 mismatches, including mutations, single base deletions or single base insertions, relative to the identical reverse complement of the corresponding guide strand sequence). The differences between the guide and passenger strand sequences are selected to favor processing of the transcribed hairpins by the mammalian RNA interference pathway and loading of the guide strand(s) into the RISC complex, to reduce expression of the target mRNA. Hairpin sequences of the invention (that is the combination of guide, loop and passenger strand sequences) in the polynucleotide are preferably sequences that are not naturally expressed sequences in mammalian cells, or from viruses that may infect mammalian cells. Hairpin sequences of the invention are preferably expressed from one or more artificial micro-RNAs.

[0015] The inhibitory polynucleotide comprises two or more hairpin sequences that are each operably linked to a heterologous promoter active in the target mammalian cell. Each hairpin sequence may be operably linked to the same promoter, or they may be linked to separate promoters. Preferably the promoter is transcribed by RNA polymerase II or RNA polymerase III, more preferably the promoter is transcribed by RNA polymerase II. In some embodiments, the promoter is an inducible promoter.

[0016] In some embodiments the inhibitory polynucleotide comprises (a) a segment encoding a multi-hairpin amiRNA sequence, wherein the segment comprises (i) a first guide strand sequence comprising a contiguous 19-22 nucleotide sequence that is perfectly complementary to a first target site of a natural mammalian cellular mRNA and a first passenger strand sequence comprising a contiguous 19-22 nucleotide sequence that is at least 78% complementary to the first guide strand sequence, wherein the first guide strand and first passenger strand sequence are separated by between 5 and 35 nucleotides; (ii) a second guide strand sequence comprising a contiguous 19-22 nucleotide sequence that is perfectly complementary to a second target site different than the first target site of the same natural mammalian cellular mRNA as the first guide strand sequence and a second passenger strand sequence comprising a contiguous 19-22 nucleotide sequence that is at least 78% complementary to the second guide strand sequence, wherein the second guide strand and second passenger strand sequence are separated by between 5 and 35 nucleotides, and wherein the first and second guide strand sequence are different from each other; and (b) a eukaryotic promoter that is active in a mammalian cell and is transcribed by RNA polymerase II or RNA polymerase III and that is operably linked to the segment encoding the amiRNA sequence, wherein the amiRNA sequence can be expressed and fold into multiple hairpins. The first passenger strand sequence may be the same length as the first guide strand sequence, or it may be shorter by 1-3 nucleotides. The first and second target sites in the mammalian cellular mRNA may have some overlap or not overlap. Optionally, the multi-hairpin amiRNA sequence reduces expression of the natural cellular mRNA to a greater extent that a control polynucleotide expressing tandem copies of the amiRNA hairpin comprising the first guide strand sequence or a control polynucleotide expressing tandem copies of the ami hairpin comprising the second guide strand sequence. Optionally, the segment encoding the multi-hairpin amiRNA sequence further comprises a third guide strand sequence comprising a contiguous 19 nucleotide sequence that is perfectly complementary to the same natural mammalian cellular mRNA as the first and second guide strand sequences and a third passenger strand sequence comprising a contiguous 19 nucleotide sequence that is at least 78% complementary to the third guide strand sequence, wherein the third guide strand and third passenger strand sequence are separated by between 5 and 35 nucleotides, and wherein the first, second and third guide strand sequences are different from each other. Optionally, the polynucleotide further comprises an open reading frame operably linked to the promoter, wherein the multi-hairpin amiRNA sequence is expressed from the promoter in a 3′ UTR following the open reading frame. Optionally, the open reading frame encodes a selectable marker, such as a fluorescent protein. Optionally, the selectable marker provides a growth advantage to the cell either by allowing the cell to synthesize a metabolically useful substance, or to survive in the presence of a harmful substance such as an antibiotic, enzyme inhibitor or cellular poison. Optionally, the selectable marker is selected from a dihydrofolate reductase, a glutamine synthetase, an aminoglycoside 3′-phosphotransferase, a puromycin acetyltransferase, a blasticidin acetyltransferase, a blasticidin deaminase, a hygromycin B phosphotransferase or a zeocin-binding protein. Optionally, the promoter is an EF1a promoter, a promoter from the immediate early genes 1, 2 or 3 of cytomegalovirus, a promoter for eukaryotic elongation factor 2, a glyceraldehyde 3-phosphate dehydrogenase promoter, an actin promoter, a phosphoglycerokinase promoter, a ubiquitin promoter, a herpes simplex virus thymidine kinase promoter or a simian virus 40 promoter. Optionally, the promoter is at least 95% or 100% identical to a nucleotide sequence selected from SEQ ID NOs: 310-399 and 404-40. Optionally, each passenger strand sequence is not complementary to its corresponding guide strand sequence at the position corresponding to the first base of the guide strand sequence. Optionally, each passenger strand sequence is not complementary to its corresponding guide strand sequence at the position corresponding to the twelfth base of the guide strand sequence. Optionally, each 5-35 nucleotide unstructured loop sequence between a guide strand sequence and its corresponding passenger strand sequence comprises a sequence selected from SEQ ID NOs: 241-250. Optionally, each guide strand-passenger strand hairpin further comprises additional sequences immediately to the 5′ and 3′ of the hairpin, wherein the additional sequence are SEQ ID NO: 255 to the 5′ and SEQ ID NO: 256 to the 3′, or SEQ ID NO: 257 to the 5′ and SEQ ID NO: 258 to the 3′, or SEQ ID NO: 259 to the 5′ and SEQ ID NO: 260 to the 3′, or SEQ ID NO: 261 to the 5′ and SEQ ID NO: 262 to the 3′, or SEQ ID NO: 263 to the 5′ and SEQ ID NO: 264 to the 3′, or SEQ ID NO: 265 to the 5′ and SEQ ID NO: 266 to the 3′, or SEQ ID NO: 267 to the 5′ and SEQ ID NO: 268 to the 3′, or SEQ ID NO: 269 to the 5′ and SEQ ID NO: 270 to the 3′.

[0017] Advantageous inhibitory polynucleotides are stably maintained in the mammalian cell, so that the target gene is permanently repressed. Preferably the inhibitory polynucleotide is integrated into the genome of the mammalian cell. To facilitate stable integration of the inhibitory polynucleotide into the genome of the mammalian cell it is advantageous to incorporate the hairpin sequences and regulatory elements required for their expression into a transposon such as a piggyBac-like transposon, or a Mariner transposons such as a Sleeping Beauty transposon, or an hAT transposon such as a TcBuster transposon, or into a viral vector such as a lentiviral vector. An advantageous inhibitory polynucleotide comprises two or more different hairpin sequences expressible in a mammalian cell, each hairpin sequence comprising a different sequence of at least 19 or 20 or 21 or 22 contiguous bases that are complementary to the target mRNA, wherein each hairpin is operably linked to a promoter that is active in a mammalian cell, and wherein the hairpins and their operably linked promoters are flanked by the inverted terminal repeats of a piggyBac-like transposon, or the inverted terminal repeats of a Mariner transposon such as a Sleeping Beauty transposon, or the inverted terminal repeats of an hAT transposon such as a TcBuster transposon such that the hairpins and their operably linked promoters are transposable by a corresponding transposase. Exemplary combinations of transposon ends are sequences selected from SEQ ID NOs: 421 and 422, or from SEQ ID NOs: 427 and 428, or from SEQ ID NOs: 431 and 432, or from SEQ ID NOs: 433 and 434, or from SEQ ID NOs: 439 and 440, or from SEQ ID NOs: 443 and 444, or from SEQ ID NOs: 564 and 447, or from SEQ ID NOs: 452 and 453, or from SEQ ID NOs: 456 and 457, or from SEQ ID NOs: 460 and 461, or from SEQ ID NOs: 528 and 529.

[0018] Alternatively, the hairpins and their operably linked promoters are flanked by the inverted terminal repeats of a lentivirus so that they can be packaged into a viral particle.

[0019] A method of the invention comprises introducing into a mammalian cell an inhibitory polynucleotide comprising two or more different hairpin sequences expressible in the mammalian cell to produce two or more different guide RNA sequences, each of which is complementary to a different region of the same target mRNA. Preferably the two or more different hairpin sequences are operably linked to the same promoter. For an inhibitory polynucleotide wherein the hairpin sequences are carried on a transposon vector, the method may further comprise introducing into the mammalian cell a corresponding transposase, either as protein or as a nucleic acid encoding the transposase. For an inhibitory polynucleotide wherein the hairpin sequences are carried on a viral vector, the method may further comprise packaging the polynucleotide into viral particles and contacting the mammalian cell with the viral particles.

[0020] A modified mammalian cell whose genome comprises an inhibitory polynucleotide comprising two or more different hairpin sequences expressible in the mammalian cell to produce two or more different guide RNA sequences each of which is complementary to a different region of the target mRNA are an aspect of the invention. A modified mammalian cell comprising an inhibitory polynucleotide that has been integrated through the action of a piggyBac-like transposase comprises at least two hairpins, each hairpin comprising a different sequence of at least 19 or 20 or 21 or 22 contiguous bases that are complementary to the a different region of the same target mRNA, and each hairpin is operably linked to a promoter that is active in a mammalian immune cell, wherein the hairpins and the promoter are flanked by the inverted terminal repeats of a piggyBac-like transposon. A modified mammalian cell, including a modified human immune cell comprising an inhibitory polynucleotide that has been integrated through the action of a Sleeping Beauty transposase comprises at least two hairpins, each hairpin comprising a different sequence of at least 19 or 20 or 21 or 22 contiguous bases that are complementary to the a different region of the same target mRNA, and each hairpin is operably linked to a promoter that is active in a mammalian immune cell, wherein the hairpins and the promoter are flanked by the inverted terminal repeats of a Sleeping Beauty transposon. A modified mammalian cell, including a modified human immune cell comprising an inhibitory polynucleotide that has been integrated through the action of a TcBuster transposase comprises at least two hairpins, each hairpin comprising a different sequence of at least 19 or 20 or 21 or 22 contiguous bases that are complementary to a different region of the same target mRNA, and each hairpin is operably linked to a promoter that is active in a mammalian immune cell, wherein the hairpins and the promoter are flanked by the inverted terminal repeats of a TcBuster transposon. A modified mammalian cell, including a modified human immune cell comprising an inhibitory polynucleotide that has been integrated through the action of a lentiviral system comprises at least two hairpins, each hairpin comprising a different sequence of at least 19 or 20 or 21 or 22 contiguous bases that are complementary to a different region of the same target mRNA, and each hairpin is operably linked to a promoter that is active in a mammalian immune cell, wherein the hairpins and the promoter are flanked by the inverted terminal repeats of a lentivirus. Preferably the immune cell whose genome comprises an inhibitory polynucleotide has improved proliferation, survival or functional properties relative to an immune cell whose genome does not comprise such an inhibitory polynucleotide.

[0021] Sequences of polynucleotides for effecting genomic modifications of mammalian cells are provided.

[0022] DHFR: The invention provides a polynucleotide comprising a) a segment encoding a multi-hairpin amiRNA sequence, wherein the segment comprises (i) a first guide strand sequence comprising a contiguous 19 nucleotide sequence that is perfectly complementary to a first target site in a natural mammalian cellular mRNA of SEQ ID NO: 11 and a first passenger strand sequence comprising a contiguous 19 nucleotide sequence that is at least 78% complementary to the first guide strand sequence, wherein the first guide strand and first passenger strand sequence are separated by between 5 and 35 nucleotides; (ii) a second guide strand sequence comprising a contiguous 19 nucleotide sequence that is perfectly complementary to a second target site different than the first target site in the same natural mammalian cellular mRNA as the first guide strand sequence and a second passenger strand sequence comprising a contiguous 19 nucleotide sequence that is at least 78% complementary to the second guide strand sequence, wherein the second guide strand and second passenger strand sequences are separated by between 5 and 35 nucleotides, and wherein the first and second guide strand sequences are different from each other; and b) a eukaryotic promoter that is active in a mammalian cell and is transcribed by RNA polymerase II or RNA polymerase III operably linked to the segment encoding the amiRNA sequence, wherein the amiRNA sequence can be expressed and fold into multiple hairpins; wherein the first and second guide strand sequences are selected from SEQ ID NOs: 82-84 and 607-616.

[0023] Optionally, the first guide strand sequence is a 19-22 nucleotide sequence perfectly complementary to the natural mammalian cellular mRNA and the first passenger strand sequence has the same length as the first guide sequence. Optionally, the first guide strand sequence is a 19-22 nucleotide sequence perfectly complementary to the natural mammalian cellular mRNA and the first passenger strand sequence is shorter than the first guide sequence. Optionally, the first and second target sites do not overlap. Optionally, the segment encoding the multi-hairpin amiRNA sequence further comprises a third guide strand sequence comprising a contiguous 19 nucleotide sequence that is perfectly complementary to the same natural mammalian cellular mRNA as the first and second guide strand sequences and a third passenger strand sequence comprising a contiguous 19 nucleotide sequence that is at least 78% complementary to the third guide strand sequence, wherein the third guide strand and third passenger strand sequences are separated by between 5 and 35 nucleotides, and wherein the first, second and third guide strand sequences are different from each other.

[0024] Optionally, the polynucleotides further comprises two transposon ends flanking the segment and the promoter, wherein the segment and the promoter are transposable by a corresponding transposase. Optionally, each transposon end comprises a sequence selected from SEQ ID NOs: 421 and 422, or from SEQ ID NOs: 427 and 428, or from SEQ ID NOs: 431 and 432, or from SEQ ID NOs: 433 and 434, or from SEQ ID NOs: 439 and 440, or from SEQ ID NOs: 443 and 444, or from SEQ ID NOs: 447 and 564, or from SEQ ID NOs: 452 and 453, or from SEQ ID NOs: 460 and 461, or from SEQ ID NOs: 528 and 529. Optionally, the polynucleotide comprises a sequence selected from SEQ ID NO: 210 and 627.

[0025] The invention further provides a mammalian cell comprising a polynucleotide as described above integrated into its genome. Optionally, the multi-hairpin amiRNA sequence is expressed and inhibits expression of the natural cellular mRNA, and whereby the growth of the cell in the presence of 50 nM methotrexate cell is inhibited relative to the growth of an otherwise identical cell whose genome does not comprise the multi-hairpin amiRNA.

[0026] The invention further provides a mammalian cell comprising a polynucleotide as described above integrated into its genome, wherein the multi-hairpin amiRNA sequence is expressed and inhibits expression of the natural cellular mRNA and a second polynucleotide comprising a gene encoding dihydrofolate reductase expressible in the mammalian cell, wherein expression of the gene compensates for the inhibition of the expression of the natural cellular mRNA, whereby the cell grows without the exogenous provision of hypoxanthine and thymidine and in the presence of at least 10 nM methotrexate. Optionally, the second polynucleotide further comprises a second gene expressible in the mammalian cell.

[0027] The invention further provides a method of selecting for integration of a nucleic acid encoding a target protein into the genome of a cell comprising: culturing a population of mammalian cells as described above in the presence of hypoxanthine and thymidine required by the cell to grow due to inhibition of expression of the natural cellular mRNA by the multi-hairpin amiRNA sequence; and transfecting the population of cells with a second polynucleotide comprising a gene encoding a dihydrofolate reductase expressible in the mammalian cells and a second gene encoding the target protein, wherein expression of the dihydrofolate reductase compensates for the inhibition of the expression of the natural cellular mRNA thereby restoring capacity to grow without hypoxanthine and thymidine and in the presence of at least 10 nM methotrexate; culturing the transfected cells with a reduced concentration or absence of the hypoxanthine and thymidine, and optionally the presence of between 10 nM and 2 uM methotrexate, wherein transfected cells surviving culturing have integrated the second polynucleotide into their genomes and can thereby express the target protein.

[0028] Synthetic amiRNA UTR: The invention further provides a polynucleotide comprising (a) an open reading frame operably linked to a first promoter that is active in a eukaryotic cell, (b) a polyadenylation signal sequence that is active in a eukaryotic cell, and (c) a sequence selected from SEQ ID NOs: 558-561, located between the open reading frame and the polyadenylation signal sequence, wherein the open reading frame does not encode Cricetulus griseus alpha-(1,6)-fucosyl transferase or Cricetulus griseus glutamine synthetase. The invention further provides a method of inhibiting expression of an open reading frame in a eukaryotic cell, comprising introducing into the eukaryotic cell (i) the polynucleotide described above and (ii) a polynucleotide encoding a multi-hairpin amiRNA comprising a sequence selected from SEQ ID NOs: 193, 194, 195 and 209 or the multi-hairpin amiRNA, wherein the multi-hairpin amiRNA inhibits expression of the open reading frame. Optionally, the polynucleotide encoding the multi-hairpin amiRNA is operably linked to a second promoter that is active in the cell. Optionally, the second promoter is inducible or constitutive. Optionally, the eukaryotic cell is a mammalian cell, a human cell, or a rodent cell. The invention further provides a cell comprising (i) the polynucleotide described above and (ii) a polynucleotide encoding a multi-hairpin amiRNA comprising a sequence selected from SEQ ID NOs: 193, 194, 195 and 209 or the multi-hairpin amiRNA.

[0029] Sialidase amiRNA: The invention further provides a polynucleotide comprising a segment encoding a) a multi-hairpin amiRNA sequence, wherein the segment comprises (i) a first guide strand sequence comprising a contiguous 19 nucleotide sequence that is perfectly complementary to a first target site of a natural mammalian cellular mRNA and a first passenger strand sequence comprising a contiguous 19 nucleotide sequence that is at least 78% complementary to the first guide strand sequence, wherein the first guide strand and first passenger strand sequence are separated by between 5 and 35 nucleotides; (ii) a second guide strand sequence comprising a contiguous 19 nucleotide sequence that is perfectly complementary to a second target site different than the first target site of the same natural mammalian cellular mRNA as the first guide strand sequence and a second passenger strand sequence comprising a contiguous 19 nucleotide sequence that is at least 78% complementary to the second guide strand sequence, wherein the second guide strand and second passenger strand sequence are separated by between 5 and 35 nucleotides, and wherein the first and second guide strand sequence are different from each other; and b) a eukaryotic promoter that is active in a mammalian cell and is transcribed by RNA polymerase II or RNA polymerase III, operably linked to the segment encoding the amiRNA sequence, wherein the amiRNA sequence can be expressed and fold into multiple hairpins, wherein the natural mammalian cellular mRNA encodes an enzyme that reduces protein sialylation.

[0030] Optionally, the natural mammalian cellular mRNA encodes a sialidase. Optionally, the natural mammalian cellular mRNA comprises a sequence that is at least 98% identical to a sequence selected from SEQ ID NOs: 13-18 or from SEQ ID NOs: 570-571. Optionally, the first and second guide strand sequences are selected from SEQ ID NOs: 85-89 or 565. Optionally, the first and second guide strand sequences are selected from SEQ ID NOs: 90-94. Optionally, the polynucleotide comprises a sequence selected from SEQ ID NOs: 212-225 or 567-569 comprising or encoding the multi-hairpin amiRNA sequence.

[0031] The invention further provides a method for increasing sialylation in a mammalian cell, comprising introducing into the mammalian cell the polynucleotide as described above flanked by transposon ends; and b) a corresponding transposase, wherein the transposase integrates the polynucleotide into the genome of the mammalian cell, whereby the mammalian cell produces a secreted protein with an increased level of sialylation relative to a control cell whose genome lacks the polynucleotide. Optionally, the corresponding transposase is introduced as a polynucleotide encoding the transposase. Optionally, the transposase is an mRNA. Optionally, the polynucleotide encoding the transposase is DNA, and comprises an open reading frame encoding the transposase operably linked to a promoter active in the mammalian cell. Optionally, the transposase is provided as transposase protein. Optionally, the genome of the mammalian cell further comprises a heterologous polynucleotide encoding the secreted protein, and the secreted protein is not naturally produced by the cell. Optionally, the method further comprises introducing into the cell the heterologous polynucleotide encoding the secreted protein, wherein the secreted protein is not naturally produced by the cell. The respective polynucleotides can be introduced in either order or at the same time, in which case they can be carried by the same DNA molecule. Optionally, the method further comprises purifying the secreted protein. Optionally, the method further comprise identifying the cell with the polynucleotide integrated into its genome. Optionally, the mammalian cell is a human cell or a CHO cell.

[0032] The invention further provides a mammalian cell produced by any of the above methods. The invention further provides a mammalian cell comprising polynucleotide as described above, wherein the polynucleotide is expressed to produce the multi-hairpin amiRNA sequence, which inhibits expression of the enzyme that reduces protein sialylation. Optionally, the cell further comprises a heterologous polynucleotide encoding a secreted protein not naturally produced by the cell, wherein sialylation of the secreted protein is increased compared with expression in a control cell lacking the polynucleotide expressed to produce the amiRNA sequence.

[0033] LPL amiRNA: The invention further provides a polynucleotide comprising a) a segment encoding a multi-hairpin amiRNA sequence, wherein the segment comprises (i) a first guide strand sequence comprising a contiguous 19 nucleotide sequence that is perfectly complementary to a first target site in a natural mammalian cellular mRNA of SEQ ID NO: 22 and a first passenger strand sequence comprising a contiguous 19 nucleotide sequence that is at least 78% complementary to the first guide strand sequence, wherein the first guide strand and first passenger strand sequence are separated by between 5 and 35 nucleotides; (ii) a second guide strand sequence comprising a contiguous 19 nucleotide sequence that is perfectly complementary to a second target site different than the first target site in the same natural mammalian cellular mRNA as the first guide strand sequence and a second passenger strand sequence comprising a contiguous 19 nucleotide sequence that is at least 78% complementary to the second guide strand sequence, wherein the second guide strand and second passenger strand sequences are separated by between 5 and 35 nucleotides, and wherein the first and second guide strand sequences are different from each other; and b) a eukaryotic promoter that is active in a mammalian cell and is transcribed by RNA polymerase II or RNA polymerase III operably linked to the segment encoding the amiRNA sequence, wherein the amiRNA sequence can be expressed and fold into multiple hairpins;

[0034] wherein the natural mammalian cellular mRNA encodes a fatty acid hydrolase. Optionally, the natural mammalian cellular mRNA comprises a sequence that is at least 98% identical to SEQ ID NO: 572 or 590-592. Optionally, the first and second guide strand sequences are selected from SEQ ID NOs: 573-578. Optionally, the polynucleotide comprises a sequence selected from SEQ ID NOs: 585-589.

[0035] The invention further provides a method for reducing lipoprotein lipase in a mammalian cell, comprising introducing into a mammalian cell a polynucleotide as described above; and a corresponding transposase, wherein the transposase integrates the polynucleotide into the genome of the cell, wherein expression of lipoprotein lipase is reduced. Optionally, a level of the lipoprotein contaminating a secreted protein produced by the cell is reduced. Optionally, transposase is introduced as a polynucleotide encoding the transposase. Optionally, the transposase is introduced as an mRNA encoding the transposase. Optionally, the polynucleotide encoding the transposase is DNA, and comprises an open reading frame encoding the transposase that is operably linked to a promoter that is active in the mammalian cell. Optionally, the transposase is provided as a transposase protein.

[0036] Optionally, the genome of the mammalian cell further comprises a gene encoding the secreted protein, and the secreted protein is not naturally produced by the cell. Optionally, the method further comprises introducing into the cell the gene encoding the secreted protein. The respective polynucleotides can be introduced in either order or at the same time, in which case they can be carried on the same DNA molecule. Optionally, the method further comprises purifying the secreted protein. Optionally, the method further comprises identifying a cell whose genome comprises the polynucleotide. Optionally, the cell is a CHO cell. The invention further provides a mammalian cell produced by any of the above methods.

[0037] IFN amiRNA: The invention provides a polynucleotide encoding a multi-hairpin amiRNA as described above, wherein the natural mammalian cellular mRNA encodes a subunit of an interferon receptor. Optionally, the natural mammalian cellular mRNA comprises a sequence that is at least 98% identical to a sequence selected from SEQ ID NOs: 19-22. Optionally, the first and second guide strand sequences are selected from SEQ ID NOs: 95-101. Optionally, the first and second guide strand sequences are selected from SEQ ID NOs: 102-107. Optionally, the polynucleotide comprises a sequence selected from SEQ ID NOs: 226-240. Optionally, the polynucleotide further comprises an open reading frame encoding an interferon polypeptide, operably linked to a promoter active in a mammalian cell.

[0038] The invention further provides a method for reducing expression of an interferon receptor in a mammalian cell, comprising introducing into the mammalian cell a polynucleotide described above flanked by transposon ends; and a corresponding transposase, wherein the transposase integrates the polynucleotide into the genome of the cell, and the polynucleotide expresses an amiRNA that reduces expression of the interferon receptor. Optionally, the corresponding transposase is introduced as a polynucleotide encoding the transposase. Optionally, the polynucleotide encoding the transposase is an mRNA. Optionally, the polynucleotide encoding the transposase is DNA, and comprises an open reading frame encoding the transposase that is operably linked to a promoter that is active in the mammalian cell. Optionally, the transposase is provided as transposase protein. Optionally, the genome of the mammalian cell further comprises a heterologous polynucleotide encoding an interferon polypeptide, expressible in the cell. Optionally, the method further comprises introducing into the cell the heterologous polynucleotide encoding the interferon polypeptide. The respective polynucleotides can be introduced in either order or at the same time, in which case they can be carried by the same DNA molecule. Optionally, the method further comprises purifying the interferon. Optionally, the method further comprises identifying the cell whose genome comprises the polynucleotide that expresses an amiRNA that reduces expression of an interferon receptor. Optionally, the mammalian cell is a human cell or a CHO cell. The invention further provides a mammalian cell produced by any of the above methods. The invention further provides a mammalian cell comprising a polynucleotide as described above, wherein the polynucleotide is expressed to produce the multi-hairpin amiRNA sequence, which inhibits expression of the subunit of the interferon receptor. Optionally, the mammalian cell further comprises a heterologous polynucleotide encoding an interferon, which is expressed with reduced toxicity to the cell compared with a control cell lacking the polynucleotide expressed to produce the amiRNA sequence.

[0039] Modification of gene to include target sites for amiRNA: The invention further provides a method of inhibiting expression of a gene in a mammalian cell, comprising modifying the mammalian cell so it expresses an mRNA encoded by the gene fused to a segment including first and second target sites different from each other; introducing in the mammalian cell a polynucleotide comprising a) a segment encoding a multi-hairpin amiRNA sequence, wherein the segment comprises i) a first guide strand sequence comprising a contiguous 19 nucleotide sequence that is perfectly complementary to the first target site and a first passenger strand sequence comprising a contiguous 19 nucleotide sequence that is at least 78% complementary to the first guide strand sequence, wherein the first guide strand and first passenger strand sequence are separated by between 5 and 35 nucleotides; (ii) a second guide strand sequence comprising a contiguous 19 nucleotide sequence that is perfectly complementary to the second target site and a second passenger strand sequence comprising a contiguous 19 nucleotide sequence that is at least 78% complementary to the second guide strand sequence, wherein the second guide strand and second passenger strand sequence are separated by between 5 and 35 nucleotides, and wherein the first and second guide strand sequence are different from each other; and b) a eukaryotic promoter that is active in a mammalian cell and is transcribed by RNA polymerase II or RNA polymerase III, operably linked to the segment encoding the amiRNA sequence, wherein the amiRNA sequence can be expressed and fold into multiple hairpins, wherein the multi-hairpin amiRNA sequence binds to the first and second target sites via the first and second guide strand sequences inhibiting expression of the gene. Optionally, the segment including the first and second target sites is fused within the 3′ UTR of the mRNA.

### BRIEF DESCRIPTION OF THE DRAWINGS

[0040] FIGS. 1A-B: Schematic representation of guide and passenger strand sequence organization. Nucleotides are shown for the coding strand of a single miRNA hairpin. The guide strand sequence is represented as 22 contiguous nucleotides N₁ to N₂₂. The sequence of the guide strand is preferably a perfect reverse complement of the target mRNA whose expression is to be reduced. The passenger strand sequence is represented as 22 contiguous nucleotides N′₁ to N′₂₂. The passenger strand sequence is preferably an imperfect reverse complement of the guide strand sequence. Corresponding bases in the guide strand sequence and passenger strand sequence are indicated by horizontal lines. For bases joined by a solid line, the base in the passenger strand is preferably the complementary base to the base in the guide strand. It is preferable if, for one or more of the bases joined by a dotted line, the base in the passenger strand is preferably not the complementary base to the base in the guide strand. If the base in the guide strand is an A or a T, the base in the passenger strand sequence is preferably a C. If the base in the guide strand sequence is a C or a G, the base in the passenger strand sequence is preferably an A. Most preferably the passenger strand sequence base at position N′₁ is not complementary to the guide strand sequence base N₁. Most preferably the passenger strand sequence base at position N′₁₂ is not complementary to the guide strand sequence base N₁₂. Mismatches may also be obtained if one or more base in the passenger strand are deleted. The guide strand sequence and the passenger strand sequence are joined by a 5-35 nucleotide unstructured loop sequence, represented as L₁-L_{Z}. The guide strand sequence may be to the 5′ of the loop sequence as shown in FIG. 1A, or to the 3′ of the loop sequence, as shown in FIG. 1B.

[0041] FIGS. 2A-B: Schematic representation of part of a multi-hairpin amiRNA gene. The processing of hairpin sequences comprising guide strand sequences, unstructured loops and passenger strand sequences to produce guide strand sequences loaded into the RISC complex for inhibition of target gene expression is improved if the amiRNA gene comprises additional features. These include additional stem structures to the 5′ and 3′ of the hairpin sequences. Element A is a sequence that is complementary to element E, and which stabilizes hairpin 1, although the complementarity between elements A and E does not need to be perfect to perform this function. Similarly, element G is a sequence that is complementary to element K, and which stabilizes hairpin 2, although the complementarity between elements A and E does not need to be perfect to perform this function. Optionally hairpins are separated by an unstructured spacer element F. Two or more hairpins are operably linked to the same promoter, and the first hairpin is separated from the promoter by a spacer sequence. Hairpin 1 is shown in a configuration with guide followed by loop followed by passenger, Hairpin 2 is shown in this same configuration in FIG. 2A, but in a passenger-loop-guide configuration in FIG. 2B. Any other combinations of configurations are acceptable. Additional hairpins may be placed following the second hairpin. Optionally the final hairpin in a multi-hairpin amiRNA gene is followed by a polyadenylation signal sequence.

[0042] FIGS. 3A-G: Mass spectra of antibodies comprising glycans produced by stably transfected CHO lines expressing multi-hairpin amiRNA genes targeting FUT8. Protein was purified from antibody-producing cells as described in Section 6.1.1.1 and analyzed by mass spectroscopy. Arrows indicate the predicted molecular weights of (i) 50,424 Da, the heavy chain modified by G₀: the conserved heptasaccharide core composed of 2 N-acetylglucosamine, 3 mannose and 2 other N-acetylglucosamine residues that are β-1,2 linked to α-6 mannose and α-3 mannose, forming two arms; (ii) 50,571 Da, the heavy chain modified by G_{0F}: the conserved heptasaccharide core plus a fucose residue; (iii) 50,586 Da, the heavy chain modified by G₁: the conserved heptasaccharide core plus a galactose residue and (iv) 50,733 Da, the heavy chain modified by G₁: the conserved heptasaccharide core plus a galactose residue plus a fucose residue. In all cases the heavy chain has also lost its C-terminal lysine residue. FIG. 3A: no amiRNA transposon; FIGS. 3B-G: multi-hairpin amiRNA transposons configured as shown in Table 1.

[0043] FIGS. 4A-D: Mass spectra of antibodies comprising glycans produced by stably transfected CHO lines expressing multi-amiRNA sequences linked to different promoters. Protein was purified from antibody-producing cells as described in Section 6.1.1.2 and analyzed by mass spectroscopy. Arrows indicate the predicted molecular weights of (i) 50,424 Da, the heavy chain modified by G₀: the conserved heptasaccharide core composed of 2 N-acetylglucosamine, 3 mannose and 2 other N-acetylglucosamine residues that are β-1,2 linked to α-6 mannose and α-3 mannose, forming two arms; (ii) 50,570 Da, the heavy chain modified by G_{0F}: the conserved heptasaccharide core plus a fucose residue; (iii) 23,443 Da, the light chain. In all cases the heavy chain has also lost its C-terminal lysine residue. FIG. 4A: no amiRNA transposon; FIG. 4B: multi-hairpin amiRNA with nucleotide sequence SEQ ID NO: 194 operably linked to an EEF2 promoter; FIG. 4C: multi-hairpin amiRNA with nucleotide sequence SEQ ID NO: 194 operably linked to a PGK promoter; FIG. 4D: multi-hairpin amiRNA with nucleotide sequence SEQ ID NO: 194 operably linked to a Ubb promoter.

[0044] FIGS. 5A-B: Mass spectra of antibodies comprising glycans produced by CHO lines expressing multi-amiRNA genes and subsequently transiently transfected with antibody genes. Protein was purified from antibody-producing cells as described in Section 6.1.1.3 and analyzed by mass spectroscopy. Arrows indicate the predicted molecular weights of (i) 50,521 Da, the heavy chain modified by G₀: the conserved heptasaccharide core composed of 2 N-acetylglucosamine, 3 mannose and 2 other N-acetylglucosamine residues that are β-1,2 linked to α-6 mannose and α-3 mannose, forming two arms; (ii) 50,668 Da, the heavy chain modified by G_{0F}: the conserved heptasaccharide core plus a fucose residue; (iii) 23,444 Da, the light chain. In all cases the heavy chain has also lost its C-terminal lysine residue. FIG. 5A: no amiRNA transposon; FIG. 5B: multi-hairpin amiRNA with nucleotide sequence SEQ ID NO: 194 operably linked to an EF1 promoter.

[0045] FIGS. 6A-B: Capillary isoelectric focusing of protein produced by CHO lines with and without sialidase-inhibiting multi-amiRNA genes. A fusion between the extracellular domain of a growth factor receptor and a human IgG1 Fc was expressed from FIG. 6A a CHO cell line and FIG. 6B the same CHO cell line transfected with a transposon comprising an amiRNA gene expressing guide RNAs complementary to the mRNA for CHO neu2 sialidase. In grey on both traces is a highly sialylated reference standard. Experimental details are given in Section 6.3.1.

### DESCRIPTION

### 5.1 Definitions

[0046] Use of the singular forms “a,” “an,” and “the” include plural references unless the context clearly dictates otherwise. Thus, for example, reference to “a polynucleotide” includes a plurality of polynucleotides, reference to “a substrate” includes a plurality of such substrates, reference to “a variant” includes a plurality of variants, and the like.

[0047] Terms such as “connected,” “attached,” “linked,” and “conjugated” are used interchangeably herein and encompass direct as well as indirect connection, attachment, linkage or conjugation unless the context clearly dictates otherwise. Where a range of values is recited, it is to be understood that each intervening integer value, and each fraction thereof, between the recited upper and lower limits of that range is also specifically disclosed, along with each subrange between such values. The upper and lower limits of any range can independently be included in or excluded from the range, and each range where either, neither or both limits are included is also encompassed within the invention. Where a value being discussed has inherent limits, for example where a component can be present at a concentration of from 0 to 100%, or where the pH of an aqueous solution can range from 1 to 14, those inherent limits are specifically disclosed. Where a value is explicitly recited, it is to be understood that values which are about the same quantity or amount as the recited value are also within the scope of the invention. Where a combination is disclosed, each sub combination of the elements of that combination is also specifically disclosed and is within the scope of the invention. Conversely, where different elements or groups of elements are individually disclosed, combinations thereof are also disclosed. Where any element of an invention is disclosed as having a plurality of alternatives, examples of that invention in which each alternative is excluded singly or in any combination with the other alternatives are also hereby disclosed; more than one element of an invention can have such exclusions, and all combinations of elements having such exclusions are hereby disclosed.

[0048] Unless defined otherwise herein, all technical and scientific terms used herein have the same meaning as commonly understood by one of ordinary skill in the art to which this invention belongs. Singleton, et. al., Dictionary of Microbiology and Molecular Biology, 2nd Ed., John Wiley and Sons, New York (1994), and Hale & Marham, The Harper Collins Dictionary of Biology, Harper Perennial, N Y, 1991, provide one of skill with a general dictionary of many of the terms used in this invention. Although any methods and materials similar or equivalent to those described herein can be used in the practice or testing of the present invention, the preferred methods and materials are described. Unless otherwise indicated, nucleic acids are written left to right in 5′ to 3′ orientation; amino acid sequences are written left to right in amino to carboxy orientation, respectively. The terms defined immediately below are more fully defined by reference to the specification as a whole.

[0049] An “artificial micro-RNA” or “amiRNA” is a sequence comprising a natural microRNA scaffold in which the guide and/or passenger strand sequences have been modified such that the guide strand is directed to an mRNA target other than the natural target. Other parts of the natural micro-RNA scaffold may also be modified, for example to improve processing by enzymes in the RNA interference pathway. An amiRNA sequence that comprises two or more guide and passenger strands operably linked to the same promoter is referred to as a “multi-hairpin amiRNA gene”. RNA sequences including shRNA and amiRNA sequences, may be provided herein as the sequence of the RNA or of the DNA that encodes them. If the DNA sequence is provided, it is intended that the sequence of the RNA will be the same with the exception that thymine (T) is replaced with uracil (U), and vice versa.

[0050] The term “codon usage” or “codon bias” refers to the relative frequencies with which different synonymous codons are used to encode an amino acid within an open reading frame. A nucleic acid sequence having codon preferences for a particular target cell has a balance of synonymous codon choices that result in efficient translation in that cell type. This balance is often not calculable from observed genomic codon frequencies, but must be empirically determined, for example as described in U.S. Pat. Nos. 7,561,972 and 7,561,973 and 8,401,798 and in Welch et. al. (2009) “Design Parameters to Control Synthetic Gene Expression in Escherichia coli”. PLoS ONE 4(9): e7002. https://doi.org/10.1371/journal.pone.0007002. A nucleic acid originally isolated from one cell type to be introduced into a target cell of another type can undergo selection of codon preferences for the target site cell such that at least 1 and sometimes, 5, 20, 15, 20, 50, 100 or more choices among synonymous codons differ between the nucleic acid introduced into the target cell from the original nucleic acid.

[0051] Two polynucleotides are “complementary” if the bases of one hydrogen bond to the bases of the other. For perfect complementarity, adenine (A) in the first polynucleotide must correspond with thymine (T) (or uracil for RNA) in the second (and vice versa), and cytosine (C) in the first polynucleotide must correspond with guanine (G) in the second (and vice versa). The two polynucleotides must also be antiparallel. If two polynucleotides are complementary, one may be described as the “reverse complement” of the other to indicate that their bases are complementary when one is in the 5′ to 3′ direction and the other is in the 3′ to 5′ direction. As used herein, when one polynucleotide sequence is described as complementary to another, it is intended to indicate that the sequences are antiparallel and able to base-pair with one another.

[0052] The “configuration” of a polynucleotide means the functional sequence elements within the polynucleotide, and the order and direction of those elements.

[0053] The terms “corresponding transposon” and “corresponding transposase” are used to indicate an activity relationship between a transposase and a transposon. A transposase transposes its corresponding transposon. Many transposases may correspond with a single transposon, and many transposons may correspond with a single transposase.

[0054] The term “counter-selectable marker” means a polynucleotide sequence that confers a selective disadvantage on a host cell. Examples of counter-selectable markers include sacB, rpsL, tetAR, pheS, thyA, gata-1, ccdB, kid and barnase (Bernard, 1995, Journal/Gene, 162: 159-160; Bernard et. al., 1994. Journal/Gene, 148: 71-74; Gabant et. al., 1997, Journal/Biotechniques, 23: 938-941; Gababt et. al., 1998, Journal/Gene, 207: 87-92; Gababt et. al., 2000, Journal/Biotechniques, 28: 784-788; Galvao and de Lorenzo, 2005, Journal/Appl Environ Microbiol, 71: 883-892; Hartzog et. al., 2005, Journal/Yeat, 22:789-798; Knipfer et. al., 1997, Journal/Plasmid, 37: 129-140; Reyrat et. al., 1998, Journal/Infect Immun, 66: 4011-4017; Soderholm et. al., 2001, Journal/Biotechniques, 31: 306-310, 312; Tamura et. al., 2005, Journal/Appl Environ Microbiol, 71: 587-590; Yazynin et. al., 1999, Journal/FEBS Lett, 452: 351-354). Counter-selectable markers often confer their selective disadvantage in specific contexts. For example, they may confer sensitivity to compounds that can be added to the environment of the host cell, or they may kill a host with one genotype but not kill a host with a different genotype. Conditions which do not confer a selective disadvantage on a cell carrying a counter-selectable marker are described as “permissive”. Conditions which do confer a selective disadvantage on a cell carrying a counter-selectable marker are described as “restrictive”.

[0055] The term “coupling element” or “translational coupling element” means a DNA sequence that allows the expression of a first polypeptide to be linked to the expression of a second polypeptide. Internal ribosome entry site elements (IRES elements) and cis-acting hydrolase elements (CHYSEL elements) are examples of coupling elements.

[0056] The terms “DNA sequence”, “RNA sequence” or “polynucleotide sequence” mean a contiguous nucleic acid sequence. The sequence can be an oligonucleotide of 2 to 20 nucleotides in length to a full-length genomic sequence of thousands or hundreds of thousands of base pairs.

[0057] The term “expression construct” means any polynucleotide designed to transcribe an RNA. For example, a construct that contains at least one promoter which is or may be operably linked to a downstream gene, coding region, or polynucleotide sequence (for example, a cDNA or genomic DNA fragment that encodes a polypeptide or protein, or an RNA effector molecule, for example, an antisense RNA, triplex-forming RNA, ribozyme, an artificially selected high affinity RNA ligand (aptamer), a double-stranded RNA, for example, an RNA molecule comprising a stem-loop or hairpin dsRNA, or a bi-finger or multi-finger dsRNA or a microRNA, or any RNA). An “expression vector” is a polynucleotide comprising a promoter which can be operably linked to a second polynucleotide. Transfection or transformation of the expression construct into a recipient cell allows the cell to express an RNA effector molecule, polypeptide, or protein encoded by the expression construct. An expression construct may be a genetically engineered plasmid, virus, recombinant virus, or an artificial chromosome derived from, for example, a bacteriophage, adenovirus, adeno-associated virus, retrovirus, lentivirus, poxvirus, or herpesvirus. Such expression vectors can include sequences from bacteria, viruses or phages. Such vectors include chromosomal, episomal and virus-derived vectors, for example, vectors derived from bacterial plasmids, bacteriophages, yeast episomes, yeast chromosomal elements, and viruses, vectors derived from combinations thereof, such as those derived from plasmid and bacteriophage genetic elements, cosmids and phagemids. An expression construct can be replicated in a living cell, or it can be made synthetically. For purposes of this application, the terms “expression construct”, “expression vector”, “vector”, and “plasmid” are used interchangeably to demonstrate the application of the invention in a general, illustrative sense, and are not intended to limit the invention to a particular type of expression construct.

[0058] The term “expression polypeptide” means a polypeptide encoded by a gene on an expression construct.

[0059] The term “expression system” means any in vivo or in vitro biological system that is used to produce one or more gene product encoded by a polynucleotide.

[0060] A “gene” refers to a transcriptional unit including a promoter and sequence to be expressed from it as an RNA or protein. The sequence to be expressed can be genomic or cDNA or one or more non-coding RNAs including siRNAs or microRNAs among other possibilities. Other elements, such as introns, and other regulatory sequences may or may not be present.

[0061] Any of the inhibitory and other polynucleotides described herein can be incorporated into a gene transfer system. A “gene transfer system” comprises a vector or gene transfer vector, or a polynucleotide comprising a gene to be transferred which is cloned into a vector (a “gene transfer polynucleotide” or “gene transfer construct”). A gene transfer system may also comprise other features to facilitate the process of gene transfer. For example, a gene transfer system may comprise a vector and a lipid or viral packaging mix for enabling a first polynucleotide to enter a cell, or it may comprise a polynucleotide that includes a transposon and a second polynucleotide sequence encoding a corresponding transposase to enhance productive genomic integration of the transposon. For example, an inhibitory or other polynucleotide of the invention can be flanked by transposon inverted terminal repeats and transposon target integration sites to facilitate integration of the polynucleotide into the genome of a cell. The transposases and transposons of a gene transfer system may be on the same nucleic acid molecule or on different nucleic acid molecules. The transposase of a gene transfer system may be provided as a polynucleotide or as a polypeptide.

[0062] The “guide” strand of an inhibitory double stranded RNA such as an shRNA or a miRNA is the strand that binds to the RNA-induced silencing complex (RISC) and participates in gene silencing. The guide strand sequence is the reverse complement of a target mRNA sequence, whose expression it inhibits.

[0063] The term “hairpin” is used to describe a polynucleotide sequence in which two regions of the same strand are reverse complements of each other in nucleotide sequence, resulting in intramolecular base pairing to form a double-stranded region and an unpaired loop. The term is used herein to describe the DNA sequence that encodes such a structure, although normally DNA is double-stranded through intermolecular base-pairing. The term is also used to refer to the RNA sequence that adopts the hairpin structure. DNA hairpins of the present invention are intended for expression as RNA. An RNA hairpin of the present invention is intended as a substrate for the RNA interference pathway enzymes to be processed into a guide strand loaded onto the RISC complex. The “guide strand” of a hairpin is the sequence that, after transcription and processing, is loaded into the RISC complex. The guide strand is complementary to the target mRNA.

[0064] Two elements are “heterologous” to one another if not naturally associated. For example, a nucleic acid sequence encoding a protein linked to a heterologous promoter means a promoter other than that which naturally drives expression of the protein. A heterologous nucleic acid flanked by transposon ends or ITRs means a heterologous nucleic acid not naturally flanked by those transposon ends or ITRs, such as a nucleic acid encoding a polypeptide other than a transposase, including an antibody heavy or light chain. A nucleic acid is heterologous to a cell if not naturally found in the cell or if naturally found in the cell but in a different location (e.g., episomal or different genomic location) than the location described.

[0065] A “hyperactive” transposase is a transposase that is more active than the naturally occurring transposase from which it is derived. “Hyperactive” transposases are thus not naturally occurring sequences.

[0066] The term “host” means any prokaryotic or eukaryotic organism that can be a recipient of a nucleic acid. A “host,” as the term is used herein, includes prokaryotic or eukaryotic organisms that can be genetically engineered. For examples of such hosts, see Maniatis et. al., Molecular Cloning. A Laboratory Manual, Cold Spring Harbor Laboratory, Cold Spring Harbor, N.Y. (1982). As used herein, the terms “host,” “host cell,” “host system” and “expression host” can be used interchangeably.

[0067] An “IRES” or “internal ribosome entry site” means a specialized sequence that directly promotes ribosome binding, independent of a cap structure.

[0068] An ‘isolated’ polypeptide or polynucleotide means a polypeptide or polynucleotide that has been either removed from its natural environment, produced using recombinant techniques, or chemically or enzymatically synthesized. Polypeptides or polynucleotides of this invention may be purified, that is, essentially free from any other polypeptide or polynucleotide and associated cellular products or other impurities.

[0069] The terms “nucleoside” and “nucleotide” include those moieties which contain not only the known purine and pyrimidine bases, but also other heterocyclic bases which have been modified. Such modifications include methylated purines or pyrimidines, acylated purines or pyrimidines, or other heterocycles. Modified nucleosides or nucleotides can also include modifications on the sugar moiety, for example, where one or more of the hydroxyl groups are replaced with halogen, aliphatic groups, or is functionalized as ethers, amines, or the like. The term “nucleotidic unit” is intended to encompass nucleosides and nucleotides.

[0070] An “Open Reading Frame” or “ORF” means a portion of a polynucleotide that, when translated into amino acids, contains no stop codons. The genetic code reads DNA sequences in groups of three base pairs, which means that a double-stranded DNA molecule can read in any of six possible reading frames-three in the forward direction and three in the reverse. An ORF typically also includes an initiation codon at which translation may start.

[0071] The term “operably linked” refers to functional linkage between two sequences such that one sequence modifies the behavior of the other. For example, a first polynucleotide comprising a nucleic acid expression control sequence (such as a promoter, IRES sequence, enhancer or array of transcription factor binding sites) and a second polynucleotide are operably linked if the first polynucleotide affects transcription and/or translation of the second polynucleotide. Similarly, a first amino acid sequence comprising a secretion signal or a subcellular localization signal and a second amino acid sequence are operably linked if the first amino acid sequence causes the second amino acid sequence to be secreted or localized to a subcellular location.

[0072] The term “orthogonal” refers to a lack of interaction between two systems. A first transposon and its corresponding first transposase and a second transposon and its corresponding second transposase are orthogonal if the first transposase does not excise or transpose the second transposon and the second transposase does not excise or transpose the first transposon.

[0073] The term “overhang” or “DNA overhang” means the single-stranded portion at the end of a double-stranded DNA molecule. Complementary overhangs are those which will base-pair with each other.

[0074] The “passenger” strand of an inhibitory double stranded RNA such as an shRNA or a miRNA is the strand that is degraded after transport to the cytoplasm and does not participate directly in gene silencing.

[0075] A “piggyBac-like transposase” means a transposase with at least 20% amino acid sequence identity as identified using the TBLASTP algorithm to the piggyBac transposase from Trichoplusia ni (SEQ ID NO: 463), and as more fully described in Sakar, A. et. al., 2003. Mol. Gen. Genomics 270: 173-180. “Molecular evolutionary analysis of the widespread piggyBac transposon family and related ‘domesticated’ species”, and further characterized by a DDE-like DDD motif, with aspartate residues at positions corresponding to D268, D346, and D447 of Trichoplusia ni piggyBac transposase on maximal alignment. PiggyBac-like transposases are also characterized by their ability to excise their transposons precisely with a high frequency. A “piggyBac-like transposon” means a transposon having transposon ends which are the same or at least 80% and preferably at least 90, 95, 96, 97, 98, 99% or 100% identical to the nucleotide sequences of the transposon ends of a naturally occurring transposon that encodes a piggyBac-like transposase. A piggyBac-like transposon includes an inverted terminal repeat (ITR) sequence of approximately 12-16 bases at each end. These repeats may be identical at the two ends, or the repeats at the two ends may differ at 1 or 2 or 3 or 4 positions in the two ITRs. The transposon is flanked on each side by a 4 base sequence corresponding to the integration target sequence which is duplicated on transposon integration (the Target Site Duplication or Target Sequence Duplication or TSD). PiggyBac-like transposons and transposases occur naturally in a wide range of organisms including Argyrogramma agnate (GU477713), Anopheles gambiae (XP_312615; XP_320414; XP_310729), Aphis gossypii (GU329918), Acyrthosiphon pisum (XP_001948139), Agrotis ipsilon (GU477714), Bombyx mori (BAD11135), Ciona intestinalis (XP_002123602), Chilo suppressalis (JX294476), Drosophila melanogaster (AAL39784), Daphnia pulicaria (AAM76342), Helicoverpa armigera (ABS18391), Homo sapiens (NP 689808), Heliothis virescens (ABD76335), Macdunnoughia crassisigna (EU287451), Macaca fascicularis (AB179012), Mus musculus (NP_741958), Pectinophora gossypiella (GU270322), Rattus norvegicus (XP_220453), Tribolium castaneum (XP_001814566) and Trichoplusia ni (AAA87375) and Xenopus tropicalis (BAF82026), although transposition activity has been described for almost none of these.

[0076] The terms “polynucleotide,” “oligonucleotide,” “nucleic acid” and “nucleic acid molecule” are used interchangeably to refer to a polymeric form of nucleotides of any length, and may comprise ribonucleotides, deoxyribonucleotides, analogs thereof, or mixtures thereof. This term refers only to the primary structure of the molecule. Thus, the term includes triple-, double- and single-stranded deoxyribonucleic acid (“DNA”), as well as triple-, double- and single-stranded ribonucleic acid (“RNA”). It also includes modified, for example by alkylation, and/or by capping, and unmodified forms of the polynucleotide. More particularly, the terms “polynucleotide,” “oligonucleotide,” “nucleic acid” and “nucleic acid molecule” include polydeoxyribonucleotides (containing 2-deoxy-D-ribose), polyribonucleotides (containing D-ribose), including tRNA, rRNA, hRNA, siRNA and mRNA, whether spliced or unspliced, any other type of polynucleotide which is an N- or C-glycoside of a purine or pyrimidine base, and other polymers containing non-nucleotidic backbones, for example, polyamide (for example, peptide nucleic acids (“PNAs”)) and polymorpholino (commercially available from the Anti-Virals, Inc., Corvallis, Oreg., as Neugene) polymers, and other synthetic sequence-specific nucleic acid polymers providing that the polymers contain nucleobases in a configuration which allows for base pairing and base stacking, such as is found in DNA and RNA. There is no intended distinction in length between the terms “polynucleotide,” “oligonucleotide,” “nucleic acid” and “nucleic acid molecule,” and these terms are used interchangeably herein. These terms refer only to the primary structure of the molecule. Thus, these terms include, for example, 3′-deoxy-2′, 5′-DNA, oligodeoxyribonucleotide N3′ P5′ phosphoramidates, 2′-O-alkyl-substituted RNA, double- and single-stranded DNA, as well as double- and single-stranded RNA, and hybrids thereof including for example hybrids between DNA and RNA or between PNAs and DNA or RNA, and also include known types of modifications, for example, labels, alkylation, “caps,” substitution of one or more of the nucleotides with an analog, internucleotide modifications such as, for example, those with uncharged linkages (for example, methyl phosphonates, phosphotriesters, phosphoramidates, carbamates, or the like) with negatively charged linkages (for example, phosphorothioates, phosphorodithioates, or the like), and with positively charged linkages (for example, aminoalkylphosphoramidates, aminoalkylphosphotriesters), those containing pendant moieties, such as, for example, proteins (including enzymes (for example, nucleases), toxins, antibodies, signal peptides, poly-L-lysine, or the like), those with intercalators (for example, acridine, psoralen, or the like), those containing chelates (of, for example, metals, radioactive metals, boron, oxidative metals, or the like), those containing alkylators, those with modified linkages (for example, alpha anomeric nucleic acids, or the like), as well as unmodified forms of the polynucleotide or oligonucleotide.

[0077] A “promoter” means a nucleic acid sequence sufficient to direct transcription of an operably linked nucleic acid molecule. A promoter can be used with or without other transcription control elements (for example, enhancers) that are sufficient to render promoter-dependent gene expression controllable in a cell type-specific, tissue-specific, or temporal-specific manner, or that are inducible by external signals or agents; such elements, may be within the 3′ region of a gene or within an intron. Desirably, a promoter is operably linked to a nucleic acid sequence, for example, a cDNA or a gene sequence, or an effector RNA coding sequence, in such a way as to enable expression of the nucleic acid sequence, or a promoter is provided in an expression cassette into which a selected nucleic acid sequence to be transcribed can be conveniently inserted. A regulatory element such as promoter active in a mammalian cell means a regulatory element configurable to result in a level of expression of at least 1 transcript and optionally at least ten transcripts per cell in a mammalian cell into which the regulatory element has been introduced. A promoter or other regulatory element active in a eukaryotic cell or other cell is correspondingly described with respect to the relevant cell.

[0078] “RNA interference” is a biological process in which RNA molecules inhibit gene expression or translation, by neutralizing targeted mRNA molecules. Historically, RNAi was known by other names, including co-suppression, post-transcriptional gene silencing (PTGS), and quelling. Micro RNAs, including artificial micro RNAs, inhibit gene expression through RNA interference.

[0079] The term “selectable marker” means a polynucleotide segment or expression product thereof that allows one to select for or against a molecule or a cell that contains it, often under particular conditions. These markers can encode an activity, such as, but not limited to, production of RNA, peptide, or protein, or can provide a binding site for RNA, peptides, proteins, inorganic and organic compounds or compositions. Examples of selectable markers include but are not limited to: (1) DNA segments that encode products which provide resistance against otherwise toxic compounds (e.g., antibiotics); (2) DNA segments that encode products which are otherwise lacking in the recipient cell (e.g., tRNA genes, auxotrophic markers); (3) DNA segments that encode products which suppress the activity of a gene product; (4) DNA segments that encode products which can be readily identified (e.g., phenotypic markers such as beta-galactosidase, green fluorescent protein (GFP), and cell surface proteins); (5) DNA segments that bind products which are otherwise detrimental to cell survival and/or function; (6) DNA segments that otherwise inhibit the activity of any of the DNA segments described in Nos. 1-5 above (e.g., antisense oligonucleotides); (7) DNA segments that bind products that modify a substrate (e.g. restriction endonucleases); (8) DNA segments that can be used to isolate a desired molecule (e.g. specific protein binding sites); (9) DNA segments that encode a specific nucleotide sequence which can be otherwise non-functional (e.g., for PCR amplification of subpopulations of molecules); and/or (10) DNA segments, which when absent, directly or indirectly confer sensitivity to particular compounds.

[0080] Sequence identity can be determined by aligning sequences using algorithms, such as BESTFIT, FASTA, and TFASTA in the Wisconsin Genetics Software Package Release 7.0, Genetics Computer Group, 575 Science Dr., Madison, Wis.), using default gap parameters, or by inspection, and the best alignment (i.e., resulting in the highest percentage of sequence similarity over a comparison window). Percentage of sequence identity is calculated by comparing two optimally aligned sequences over a window of comparison, determining the number of positions at which the identical residues occurs in both sequences to yield the number of matched positions, dividing the number of matched positions by the total number of matched and mismatched positions not counting gaps in the window of comparison (i.e., the window size), and multiplying the result by 100 to yield the percentage of sequence identity. Unless otherwise indicated the window of comparison between two sequences is defined by the entire length of the shorter of the two sequences.

[0081] A “target nucleic acid” is a nucleic acid into which a transposon is to be inserted. Such a target can be part of a chromosome, episome or vector.

[0082] An “integration target sequence” or “target sequence” or “target site” for a transposase is a site or sequence in a target DNA molecule into which a transposon can be inserted by a transposase. The piggyBac transposase from Trichoplusia ni inserts its transposon predominantly into the target sequence 5′-TTAA-3′. Other useable target sequences for piggyBac transposons are 5′-CTAA-3′, 5′-TTAG-3′, 5′-ATAA-3′, 5′-TCAA-3′, 5′-AGTT-3′, 5′-ATTA-3′, 5′-GTTA-3′, 5′-TTGA-3′, 5′-TTTA-3′, 5′-TTAC-3′, 5′-ACTA-3′, 5′-AGGG-3′, 5′-CTAG-3′, 5′-GTAA-3′, 5′-AGGT-3′, 5′-ATCA-3′, 5′-CTCC-3′, 5′-TAAA-3′, 5′-TCTC-3′, 5′-TGAA-3′, 5′-AAAT-3′, 5′-AATC-3′, 5′-ACAA-3′, 5′-ACAT-3′, 5′-ACTC-3′, 5′-AGTG-3′, 5′-ATAG-3′, 5′-CAAA-3′, 5′-CACA-3′, 5′-CATA-3′, 5′-CCAG-3′, 5′-CCCA-3′, 5′-CGTA-3′, 5′-CTGA-3′, 5′-GTCC-3′, 5′-TAAG-3′, 5′-TCTA-3′, 5′-TGAG-3′, 5′-TGTT-3′, 5′-TTCA-3′, 5′-TTCT-3′ and 5′-TTTT-3′ (Li et al., 2013. Proc. Natl. Acad. Sci vol. 110, no. 6, E478-487) and 5′-TTAT. PiggyBac-like transposases transpose their transposons using a cut-and-paste mechanism, which results in duplication of their 4 base pair target sequence on insertion into a DNA molecule. The target sequence is thus found on each side of an integrated piggyBac-like transposon.

[0083] The term “translation” refers to the process by which a polypeptide is synthesized by a ribosome ‘reading’ the sequence of a polynucleotide.

[0084] A ‘transposase’ is a polypeptide that catalyzes the excision of a corresponding transposon from a donor polynucleotide, for example a vector, and (providing the transposase is not integration-deficient) the subsequent integration of the transposon into a target nucleic acid.

[0085] The term “transposition” is used herein to mean the action of a transposase in excising a transposon from one polynucleotide and then integrating it, either into a different site in the same polynucleotide, or into a second polynucleotide.

[0086] The term “transposon” means a polynucleotide that can be excised from a first polynucleotide, for instance, a vector, and be integrated into a second position in the same polynucleotide, or into a second polynucleotide, for instance, the genomic or extrachromosomal DNA of a cell, by the action of a corresponding trans-acting transposase. A transposon comprises a first transposon end and a second transposon end, which are polynucleotide sequences recognized by and transposed by a transposase. A transposon usually further comprises a first polynucleotide sequence between the two transposon ends, such that the first polynucleotide sequence is transposed along with the two transposon ends by the action of the transposase. This first polynucleotide in natural transposons frequently comprises an open reading frame encoding a corresponding transposase that recognizes and transposes the transposon. Transposons of the present invention are “synthetic transposons” comprising a heterologous polynucleotide sequence which is transposable by virtue of its juxtaposition between two transposon ends. Synthetic transposons may or may not further comprise flanking polynucleotide sequence(s) outside the transposon ends, such as a sequence encoding a transposase, a vector sequence or sequence encoding a selectable marker.

[0087] The term “transposon end” means the cis-acting nucleotide sequences that are sufficient for recognition by and transposition by a corresponding transposase. Transposon ends of piggyBac-like transposons comprise perfect or imperfect repeats such that the respective repeats in the two transposon ends are reverse complements of each other. These are referred to as inverted terminal repeats (ITR) or terminal inverted repeats (TIR). A transposon end may or may not include additional sequence proximal to the ITR that promotes or augments transposition.

[0088] The term “vector” or “DNA vector” or “gene transfer vector” refers to a polynucleotide that is used to perform a “carrying” function for another polynucleotide. For example, vectors are often used to allow a polynucleotide to be propagated within a living cell, or to allow a polynucleotide to be packaged for delivery into a cell, or to allow a polynucleotide to be integrated into the genomic DNA of a cell. A vector may further comprise additional functional elements, for example it may comprise a transposon.

[0089] Any disclosure associating a polynucleotide with a SEQ ID NO. irrespective of transitional term used for the association, should be understood as providing disclosure of any of polynucleotide comprising the SEQ ID NO., consisting of the SEQ ID NO. or consisting essentially of the SEQ ID NO.

[0090] Unless the context requires otherwise reference to an amiRNA should be understood as alternatively disclosing a DNA encoding the amiRNA and vice versa.

### 5.2 Genetic Elements Useful for Expression in Cultured Mammalian Cells

### 5.2.1 Gene Transfer Systems

[0091] Gene transfer systems comprise a polynucleotide to be transferred to a host cell. The gene transfer system may comprise any of the polynucleotides describes herein. Some gene transfer systems are in the form of transposons described herein together with their corresponding transposases. Although transposons are preferred gene transfer systems because of their large cargo sizes and because multiple different open reading frames with all of their associated regulatory elements can be incorporated without compromising packaging and delivery of the gene transfer system, a gene transfer system for delivery of an inhibitory gene transfer polynucleotide may comprise one or more polynucleotides that have other features that facilitate efficient gene transfer without the need for a transposase or transposon, for example a viral system such as a lentiviral system, an adenoviral system or an adeno-associated viral system.

[0092] The components of the gene transfer system may be transfected into one or more cells by techniques such as particle bombardment, electroporation, microinjection, combining the components with lipid-containing vesicles, such as cationic lipid vesicles, DNA condensing reagents (example, calcium phosphate, polylysine or polyethyleneimine), and inserting the components (that is the nucleic acids thereof into a viral vector and contacting the viral vector with the cell. Where a viral vector is used, the viral vector can include any of a variety of viral vectors known in the art including viral vectors selected from the group consisting of a retroviral vector, an adenovirus vector or an adeno-associated viral vector. A retroviral vector may be a lentiviral vector comprising two LTRs each of which is at least 90% identical to a nucleotide sequence selected from SEQ ID NOs: 531-532. An adeno-associated viral vector may comprise two ITRs each of which is at least 90% identical to a nucleotide sequence selected from SEQ ID NOs: 533-539. The gene transfer system may be formulated in a suitable manner as known in the art, or as a pharmaceutical composition or kit.

[0093] The consistency of expression of a gene from a heterologous polynucleotide in a cultured mammalian cell can be improved if the heterologous polynucleotide is integrated into the genome of the host cell. Integration of a polynucleotide into the genome of a host cell also generally makes it stably heritable, by subjecting it to the same mechanisms that ensure the replication and division of genomic DNA. Such stable heritability is desirable for achieving good and consistent expression over long growth periods. For stable modification of cultured mammalian cells, including the consistent expression of inhibitory RNAs such as miRNAs and amiRNAs, the stability of the modification and consistency of expression levels are important, particularly for therapeutic applications.

### 5.2.2 Transposon Elements

[0094] Heterologous polynucleotides may be more efficiently integrated into a target genome if they are part of a transposon, for example so that they may be integrated by a transposase. A particular benefit of a transposon is that the entire polynucleotide between the transposon ITRs is integrated. This is in contrast with random integration, where a polynucleotide introduced into a eukaryotic cell is often fragmented at random in the cell, and only parts of the polynucleotide become incorporated into the target genome, usually at a low frequency. There are several different classes of transposon. piggyBac-like transposons include the piggyBac transposon from the looper moth Trichoplusia ni, Xenopus piggyBac-like transposons, Bombyx piggyBac-like transposons, Heliothis piggyBac-like transposons, Helicoverpa piggyBac-like transposons, Agrotis piggyBac-like transposons, Amyelois piggyBac-like transposons, piggyBat piggyBac-like transposons and Oryzias piggyBac-like transposons. hAT transposons include TcBuster. Mariner transposons include Sleeping Beauty. Each of these transposons can be integrated into the genome of a mammalian cell by a corresponding transposase. Heterologous polynucleotides incorporated into transposons may be integrated into cultured mammalian cells, as well as hepatocytes, neural cells, muscle cells, blood cells, embryonic stem cells, somatic stem cells, hematopoietic cells, embryos, zygotes and sperm cells (some of which are open to be manipulated in an in vitro setting). Preferred cells can also be pluripotent cells (cells whose descendants can differentiate into several restricted cell types, such as hematopoietic stem cells or other stem cells) or totipotent cells (i.e., a cell whose descendants can become any cell type in an organism, e.g., embryonic stem cells).

[0095] Preferred gene transfer systems, including inhibitory polynucleotides comprising sequences for the expression of inhibitory RNAs, comprise a transposon in combination with a corresponding transposase protein that transposases the transposon, or a nucleic acid that encodes the corresponding transposase protein and is expressible in the target cell.

[0096] When there are multiple components of a gene transfer system, for example one or more polynucleotides comprising transposon ends flanking genes for expression in the target cell, and a transposase (which may be provided either as a protein or encoded by a nucleic acid), these components can be transfected into a cell at the same time, or sequentially. For example, a transposase protein or its encoding nucleic acid may be transfected into a cell prior to, simultaneously with or subsequently to transfection of a corresponding transposon. Additionally, administration of either component of the gene transfer system may occur repeatedly, for example, by administering at least two doses of this component.

[0097] Transposase proteins may be encoded by polynucleotides including RNA or DNA.

[0098] Preferable RNA molecules include those with appropriate substitutions to reduce toxicity effects on the cell, for example substitution of uridine with pseudouridine, and substitution of cytosine with 5-methyl cytosine. mRNA encoding the transposase may be prepared such that it has a 5′-cap structure to improve expression in a target cell. Exemplary cap structures are a cap analog (G(5)ppp(5′)G), an anti-reverse cap analog (3′-O-Me-m⁷G(5′)ppp(5′)G, a clean cap (m7G(5)ppp(5′)(2′OMeA)pG), an mCap (m7G(5′)ppp(5′)G). mRNA encoding the transposase may be prepared such that some bases are partially or fully substituted, for example uridine may be substituted with pseudo-uridine, cytosine may be substituted with 5-methyl-cytosine. Any combinations of these caps and substitutions may be made. Similarly, the nucleic acid encoding the transposase protein, or the transposon of this invention can be transfected into the cell as a linear fragment or as a circularized fragment, either as a plasmid or as recombinant viral DNA. If the transposase is introduced as a DNA sequence encoding the transposase, then the open reading frame encoding the transposase is preferably operably linked to a promoter that is active in the target mammalian cell.

[0099] An advantageous piggyBac-like transposon for modifying the genome of a mammalian cell is a Xenopus transposon which comprises an ITR with the with nucleotide sequence of SEQ ID NO: 421, a heterologous polynucleotide to be transposed and a second ITR with nucleotide sequence of SEQ ID NO: 422. The transposon may further be flanked by a copy of the tetranucleotide 5′-TTAA-3′ on each side, immediately adjacent to the ITRs and distal to the heterologous polynucleotide. The transposon may further comprise a nucleotide sequence immediately adjacent to the ITR and proximal to the heterologous polynucleotide that is at least 95% identical to SEQ ID NO: 417 or 418 on one side of the heterologous polynucleotide, preferably the left side, and a nucleotide sequence immediately adjacent to the ITR and proximal to the heterologous polynucleotide that is at least 95% identical to SEQ ID NO: 419 or 420 on the other side of the heterologous polynucleotide, preferably the right side. This transposon may be transposed by a corresponding Xenopus transposase comprising a polypeptide sequence at least 90% identical to the polypeptide sequence of SEQ ID NO: 465 or 466, for example any of SEQ ID NOs: 465-497. Preferably the transposase is a hyperactive variant of a naturally occurring transposase. Preferably the hyperactive variant transposase comprises one or more of the following amino acid changes, relative to the polypeptide sequence of SEQ ID NO: 465: Y6L, Y6H, Y6V, Y6I, Y6C, Y6G, Y6A, Y6S, Y6F, Y6R, Y6P, Y6D, Y6N, S7G, S7V, S7D, E9W, E9D, E9E, M16E, M16N, M16D, M16S, M16Q, M16T, M16A, M16L, M16H, M16F, M16I, S18C, S18Y, S18M, S18L, S18Q, S18G, S18P, S18A, S18W, S18H, S18K, S18I, S18V, S19C, S19V, S19L, S19F, S19K, S19E, S19D, S19G, S19N, S19A, S19M, S19P, S19Y, S19R, S19T, S19Q, S20G, S20M, S20L, S20V, S20H, S20W, S20A, S20C, S20Q, S20D, S20F, S20N, S20R, E21N, E21W, E21G, E21Q, E21L, E21D, E21A, E21P, E21T, E21S, E21Y, E21V, E21F, E21M, E22C, E22H, E22R, E22L, E22K, E22S, E22G, E22M, E22V, E22Q, E22A, E22Y, E22W, E22D, E22T, F23Q, F23A, F23D, F23W, F23K, F23T, F23V, F23M, F23N, F23P, F23H, F23E, F23C, F23R, F23Y, S24L, S24W, S24H, S24V, S24P, S24I, S24F, S24K, S24Y, S24D, S24C, S24N, S24G, S24A, S26F, S26H, S26V, S26Q, S26Y, S26W, S28K, S28Y, S28C, S28M, S28L, S28H, S28T, S28Q, V31L, V31T, V31I, V31Q, V31K, A34L, A34E, L67A, L67T, L67M, L67V, L67C, L67H, L67E, L67Y, G73H, G73N, G73K, G73F, G73V, G73D, G73S, G73W, G73L, A76L, A76R, A76E, A76I, A76V, D77N, D77Q, D77Y, D77L, D77T, P88A, P88E, P88N, P88H, P88D, P88L, N91D, N91R, N91A, N91L, N91H, N91V, Y141I, Y141M, Y141Q, Y141S, Y141E, Y141W, Y141V, Y141F, Y141A, Y141C, Y141K, Y141L, Y141H, Y141R, N145C, N145M, N145A, N145Q, N145I, N145F, N145G, N145D, N145E, N145V, N145H, N145W, N145Y, N145L, N145R, N145S, P146V, P146T, P146W, P146C, P146Q, P146L, P146Y, P146K, P146N, P146F, P146E, P148M, P148R, P148V, P148F, P148T, P148C, P148Q, P148H, Y150W, Y150A, Y150F, Y150H, Y150S, Y150V, Y150C, Y150M, Y150N, Y150D, Y150E, Y150Q, Y150K, H157Y, H157F, H157T, H157S, H157W, A162L, A162V, A162C, A162K, A162T, A162G, A162M, A162S, A162I, A162Y, A162Q, A179T, A179K, A179S, A179V, A179R, L182V, L182I, L182Q, L182T, L182W, L182R, L182S, T189C, T189N, T189L, T189K, T189Q, T189V, T189A, T189W, T189Y, T189G, T189F, T189S, T189H, L192V, L192C, L192H, L192M, L192I, S193P, S193T, S193R, S193K, S193G, S193D, S193N, S193F, S193H, S193Q, S193Y, V196L, V196S, V196W, V196A, V196F, V196M, V196I, S198G, S198R, S198A, S198K, T200C, T200I, T200M, T200L, T200N, T200W, T200V, T200Q, T200Y, T200H, T200R, S202A, S202P, L210H, L210A, F212Y, F212N, F212M, F212C, F212A, N218V, N218R, N218T, N218C, N218G, N218I, N218P, N218D, N218E, A248S, A248L, A248H, A248C, A248N, A248I, A248Q, A248Y, A248M, A248D, L263V, L263A, L263M, L263R, L263D, Q270V, Q270K, Q270A, Q270C, Q270P, Q270L, Q270I, Q270E, Q270G, Q270Y, Q270N, Q270T, Q270W, Q270H, S294R, S294N, S294G, S294T, S294C, T297C, T297P, T297V, T297M, T297L, T297D, E304D, E304H, E304S, E304Q, E304C, S308R, S308G, L310R, L310I, L310V, L333M, L333W, L333F, Q336Y, Q336N, Q336M, Q336A, Q336T, Q336L, Q336I, Q336G, Q336F, Q336E, Q336V, Q336C, Q336H, A354V, A354W, A354D, A354C, A354R, A354E, A354K, A354H, A354G, C357Q, C357H, C357W, C357N, C357I, C357V, C357M, C357R, C357F, C357D, L358A, L358F, L358E, L358R, L358Q, L358V, L358H, L358C, L358M, L358Y, L358K, L358N, L358I, D359N, D359A, D359L, D359H, D359R, D359S, D359Q, D359E, D359M, L377V, L377I, V423N, V423P, V423T, V423F, V423H, V423C, V423S, V423G, V423A, V423R, V423L, P426L, P426K, P426Y, P426F, P426T, P426W, P426V, P426C, P426S, P426Q, P426H, P426N, K428R, K428Q, K428N, K428T, K428F, S434A, S434T, S438Q, S438A, S438M, T447S, T447A, T447C, T447Q, T447N, T447G, L450M, L450V, L450A, L450I, L450E, A462M, A462T, A462Y, A462F, A462K, A462R, A462Q, A462H, A462E, A462N, A462C, V467T, V467C, V467A, V467K, I469V, I469N, I472V, I472L, I472W, I472M, I472F, L476I, L476V, L476N, L476F, L476M, L476C, L476Q, P488E, P488H, P488K, P488Q, P488F, P488M, P488L, P488N, P488D, Q498V, Q498L, Q498G, Q498H, Q498T, Q498C, Q498E, Q498M, L502I, L502M, L502V, L502G, L502F, E517M, E517V, E517A, E517K, E517L, E517G, E517S, E517I, P520W, P520R, P520M, P520F, P520Q, P520V, P520G, P520D, P520K, P520Y, P520E, P520L, P520T, S521A, S521H, S521C, S521V, S521W, S521T, S521K, S521F, S521G, N523W, N523A, N523G, N523S, N523P, N523M, N523Q, N523L, N523K, N523D, N523H, N523F, N523C, I533M, I533V, I533T, I533S, I533F, I533G, I533E, D534E, D534Q, D534L, D534R, D534V, D534C, D534M, D534N, D534A, D534G, D534F, D534T, D534H, D534K, D534S, F576L, F576K, F576V, F576D, F576W, F576M, F576C, F576R, F576Q, F576A, F576Y, F576N, F576G, F576I, F576E, K577L, K577G, K577D, K577R, K577H, K577Y, K577I, K577E, K577V, K577N, I582V, I582K, I582R, I582M, I582G, I582N, I582E, I582A, I582Q, Y583L, Y583C, Y583F, Y583D, Y583Q, L587F, L587D, L587R, L587I, L587P, L587N, L587E, L587S, L587Y, L587M, L587Q, L587G, L587W, L587K or L587T.

[0100] An advantageous piggyBac-like transposon for modifying the genome of a mammalian cell is a Bombyx transposon which comprises an ITR with the nucleotide sequence of SEQ ID NO: 427, a heterologous polynucleotide to be transposed and a second ITR with the nucleotide sequence of SEQ ID NO: 428. The transposon may further be flanked by a copy of the tetranucleotide 5′-TTAA-3′ on each side, immediately adjacent to the ITRs and distal to the heterologous polynucleotide. The transposon may further comprise a nucleotide sequence immediately adjacent to the ITR and proximal to the heterologous polynucleotide that is at least 95% identical to SEQ ID NO: 425 on one side of the heterologous polynucleotide, preferably the left side, and a sequence immediately adjacent to the ITR and proximal to the heterologous polynucleotide that is at least 95% identical to SEQ ID NO: 426 on the other side of the heterologous polynucleotide, preferably the right side. This transposon may be transposed by a corresponding Bombyx transposase comprising a polypeptide sequence at least 90% identical to SEQ ID NO: 498, for example any of SEQ ID NOs: 498-520. Preferably the transposase is a hyperactive variant of a naturally occurring transposase. Preferably the hyperactive variant transposase comprises one or more of the following amino acid changes, relative to the sequence of SEQ ID NO: 498: Q85E, Q85M, Q85K, Q85H, Q85N, Q85T, Q85F, Q85L, Q92E, Q92A, Q92P, Q92N, Q92I, Q92Y, Q92H, Q92F, Q92R, Q92D, Q92M, Q92W, Q92C, Q92G, Q92L, Q92V, Q92T, V93P, V93K, V93M, V93F, V93W, V93L, V93A, V93I, V93Q, P96A, P96T, P96M, P96R, P96G, P96V, P96E, P96Q, P96C, F97Q, F97K, F97H, F97T, F97C, F97W, F97V, F97E, F97P, F97D, F97A, F97R, F97G, F97N, F97Y, H165E, H165G, H165Q, H165T, H165M, H165V, H165L, H165C, H165N, H165D, H165K, H165W, H165A, E178S, E178H, E178Y, E178F, E178C, E178A, E178Q, E178G, E178V, E178D, E178L, E178P, E178W, C189D, C189Y, C189I, C189W, C189T, C189K, C189M, C189F, C189P, C189Q, C189V, A196G, L200I, L200F, L200C, L200M, L200Y, A201Q, A201L, A201M, L203V, L203D, L203G, L203E, L203C, L203T, L203M, L203A, L203Y, N207G, N207A, L211G, L211M, L211C, L211T, L211V, L211A, W215Y, T217V, T217A, T217I, T217P, T217C, T217Q, T217M, T217F, T217D, T217K, G219S, G219A, G219C, G219H, G219Q, Q235C, Q235N, Q235H, Q235G, Q235W, Q235Y, Q235A, Q235T, Q235E, Q235M, Q235F, Q238C, Q238M, Q238H, Q238V, Q238L, Q238T, Q238I, R242Q, K246I, K253V, M258V, F261L, S263K, C271S, N303C, N303R, N303G, N303A, N303D, N303S, N303H, N303E, N303R, N303K, N303L, N303Q, I312F, I312C, I312A, I312L, I312I, I312V, I312G, I312M, F321H, F321R, F321N, F321Y, F321W, F321D, F321G, F321E, F321M, F321K, F321A, F321Q, V323I, V323L, V323T, V323M, V323A, V324N, V324A, V324C, V324I, V324L, V324T, V324K, V324Y, V324H, V324F, V324S, V324Q, V324M, V324G, A330K, A330V, A330P, A330S, A330C, A330T, A330L, Q333P, Q333T, Q333M, Q333H, Q333S, P337W, P337E, P337H, P337I, P337A, P337M, P337N, P337D, P337K, P337Q, P337G, P337S, P337C, P337L, P337V, F368Y, L373C, L373V, L373I, L373S, L373T, V389I, V389M, V389T, V389L, V389A, R394H, R394K, R394T, R394P, R394M, R394A, Q395P, Q395F, Q395E, Q395C, Q395V, Q395A, Q395H, Q395S, Q395Y, S399N, S399E, S399K, S399H, S399D, S399Y, S399G, S399Q, S399R, S399T, S399A, S399V, S399M, R402Y, R402K, R402D, R402F, R402G, R402N, R402E, R402M, R402S, R402Q, R402I, R402C, R402L, R402V, I403W, I403A, I403V, I403F, I403L, I403Y, I403N, I403G, I403C, I403I, I403S, I403M, I403Q, I403K, T403E, D404I, D404S, D404E, D404N, D404H, D404C, D404M, D404G, D404A, D404Q, D404L, D404P, D404V, D404W, D404F, N408F, N408I, N408A, N408E, N408M, N408S, N408D, N408Y, N408H, N408C, N408Q, N408V, N408W, N408L, N408P, N408K, S409H, S409Y, S409N, S409I, S409D, S409F, S409T, S409C, S409Q, N441F, N441R, N441M, N441G, N441C, N441D, N441L, N441A, N441V, N441W, G448W, G448Y, G448H, G448C, G448I, G448V, G448N, G448Q, E449A, E449P, E449T, E449L, E449H, E449G, E449C, E449I, V469T, V469A, V469H, V469C, V469L, L472K, L472Q, L472M, C473G, C473Q, C473T, C473I, C473M, R484H, R484K, T507R, T507D, T507S, T507G, T507K, T507I, T507M, T507E, T507C, T507L, T507V, G523Q, G523T, G523A, G523M, G523S, G523C, G523I, G523L, I527M, I527V, Y528N, Y528W, Y528M, Y528Q, Y528K, Y528V, Y528I, Y528G, Y528D, Y528A, Y528E, Y528R, Y543C, Y543W, Y543I, Y543M, Y543Q, Y543A, Y543R, Y543H, E549K, E549C, E549I, E549Q, E549A, E549H, E549C, E549M, E549S, E549F, E549L, K550R, K550M, K550Q, S556G, S556V, S556I, P557W, P557T, P557S, P557A, P557Q, P557K, P557D, P557G, P557N, P557L, P557V, H559K, H559S, H559C, H559I, H559W, V560F, V560P, V560I, V560H, V560Y, V560K, N561P, N561Q, N561G, N561A, V562Y, V562I, V562S, V562M, V567I, V567H, V567N, S583M, E601V, E601F, E601Q, E601W, E605R, E605W, E605K, E605M, E605P, E605Y, E605C, E605H, E605A, E605Q, E605S, E605V, E605I, E605G, D607V, D607Y, D607C, D607N, D607W, D607T, D607A, D607H, D607Q, D607E, D607L, D607K, D607G, S609R, S609W, S609H, S609V, S609Q, S609G, S609T, S609K, S609N, S609Y, L610T, L610I, L610K, L610G, L610A, L610W, L610D, L610Q, L610S, L610F or L610N.

[0101] An advantageous piggyBac-like transposon for modifying the genome of a mammalian cell is a piggyBat transposon which comprises an ITR with the nucleotide sequence of SEQ ID NO: 433, a heterologous polynucleotide to be transposed and a second ITR with the nucleotide sequence of SEQ ID NO: 434. The transposon may further be flanked by a copy of the tetranucleotide 5′-TTAA-3′ on each side, immediately adjacent to the ITRs and distal to the heterologous polynucleotide. The transposon may further comprise a nucleotide sequence immediately adjacent to the ITR and proximal to the heterologous polynucleotide that is at least 95% identical to SEQ ID NO: 435 on one side of the heterologous polynucleotide, preferably the left side, and a nucleotide sequence immediately adjacent to the ITR and proximal to the heterologous polynucleotide that is at least 95% identical to SEQ ID NO: 436 on the other side of the heterologous polynucleotide, preferably the right side. This transposon may be transposed by a corresponding piggyBat transposase comprising a polypeptide sequence at least 90% identical to SEQ ID NO: 462. Preferably the transposase is a hyperactive variant of a naturally occurring transposase. Preferably the hyperactive variant transposase comprises one or more of the following amino acid changes, relative to the sequence of SEQ ID NO: 462: A14V, D475G, P491Q, A561 T, T546T, T300A, T294A, A520T, G239S, S5P, S8F, S54N, D9N, D9G, 1345 V, M481V, E11G, K130T, G9G, R427H, S8P, S36G, D1OG, S36G.

[0102] An advantageous piggyBac-like transposon for modifying the genome of a mammalian cell is a piggyBac transposon which comprises an ITR with the nucleotide sequence of SEQ ID NO: 431, a heterologous polynucleotide to be transposed and a second ITR with the nucleotide sequence of SEQ ID NO: 432. The transposon may further be flanked by a copy of the tetranucleotide 5′-TTAA-3′ on each side, immediately adjacent to the ITRs and distal to the heterologous polynucleotide. The transposon may further comprise a nucleotide sequence immediately adjacent to the ITR and proximal to the heterologous polynucleotide that is at least 95% identical to SEQ ID NO: 429 on one side of the heterologous polynucleotide, preferably the left side, and a nucleotide sequence immediately adjacent to the ITR and proximal to the heterologous polynucleotide that is at least 95% identical to SEQ ID NO: 430 on the other side of the heterologous polynucleotide preferably the right side. This transposon may be transposed by a corresponding piggyBac transposase comprising a polypeptide sequence at least 90% identical to SEQ ID NO: 463. Preferably the transposase is a hyperactive variant of a naturally occurring transposase. Preferably the hyperactive variant transposase comprises one or more of the following amino acid changes, relative to the sequence of SEQ ID NO: 463: G2C, Q40R, I30V, G165S, T43A, S61R, S103P, S103T, M194V, R281G, M282V, G316E, I426V, Q497L, N505D, Q573L, S509G, N570S, N538K, Q591P, Q591R, F594L, M194V, 130V, S103P, G165S, M282V, S509G, N538K, N571S, C41T, A1424G, C1472A, G1681A, T150C, A351G, A279G, T1638C, A898G, A880G, G1558A, A687G, G715A, T13C, C23T, G161A, G25A, T1050C, A1356G, A26G, A1033G, A1441G, A32G, A389C, A32G, A389C, A32G, T1572A, G456A, T1641C, Tl 155C, G1280A, T22C, A106G, A29G, C137T, A14V, D475G, P491Q, A561T, T546T, T300A, T294A, A520T, G239S, S5P, S8F, S54N, D9N, D9G, 1345 V, M481V, E11G, K130T, G9G, R427H, S8P, S36G, D10G, S36G, A51T, C153A, C277T, G201A, G202A, T236A, A103T, A104C, T140C, G138T, T118A, C74T, A179C, S3N, 130V, A46S, A46T, I82W, S103P, R119P, C125A, C125L, G165S, Y177K, Y177H, F180L, F180I, F180V, M185L, A187G, F200W, V207P, V209F, M226F, L235R, V240K, F241L, P243K, N258S, M282Q, L296W, L296Y, L296F, M298V, M298A, M298L, P311V, P3111, R315K, T319G, Y327R, Y328V, C340G, C340L, D421H, V436I, M456Y, L470F, S486K, M5031, M503L, V552K, A570T, Q591P, Q591R, R65A, R65E, R95A, R95E, R97A, R97E, R135A, R135E, R161A, R161E, R192A, R192E, R208A, R208E, K176A, K176E, K195A, K195E, S171E, M14V, D270N, 130V, G165S, M282L, M2821, M282V or M282A.

[0103] An advantageous piggyBac-like transposon for modifying the genome of a cultured mammalian cell is an Amyelois transposon comprising an ITR with the nucleotide sequence of SEQ ID NO: 439, a heterologous polynucleotide and a second ITR with the nucleotide sequence of SEQ ID NO: 440. The transposon may further be flanked by a copy of the tetranucleotide 5′-TTAA-3′ on each side, immediately adjacent to the ITRs and distal to the heterologous polynucleotide. The transposon may further comprise a nucleotide sequence that is at least 95% identical to SEQ ID NO: 437 on one side of the heterologous polynucleotide, and a nucleotide sequence that is at least 95% identical to SEQ ID NO: 438 on the other side of the heterologous polynucleotide. This transposon may be transposed by a corresponding Amyelois transposase comprising a polypeptide sequence at least 90% identical to SEQ ID NO: 521. Preferably the transposase is a hyperactive variant of a naturally occurring transposase. Preferably the hyperactive variant transposase comprises one or more of the following amino acid changes, relative to the sequence of SEQ ID NO: 521: P65E, P65D, R95S, R95T, V100I, V100L, V100M, L115D, L115E, E116P, H121Q, H121N, K139E, K139D, T159N, T159Q, V166F, V166Y, V166W, G179N, G179Q, W187F, W187Y, P198R, P198K, L203R, L203K, I209L, I209V, I209M, N211R, N211K, E238D, L273I, L273V, L273M, D304K, D304R, I323L, I323M, I323V, Q329G, Q329R, Q329K, T345L, T345I, T345V, T345M, K362R, T366R, T366K, T380S, L408M, L408I, L408V, E413S, E413T, S416E, S416D, I426M, I426L, I426V, S435G, L458M, L458I, L458V, A472S, A472T, V475I, V475L, V475M, N483K, N483R, I491M, I491V, I491L, A529P, K540R, S560K, S560R, T562K, T562R, S563K, S563R.

[0104] An advantageous piggyBac-like transposon for modifying the genome of a cultured mammalian cell is a Heliothis transposon comprising an ITR with the nucleotide sequence of SEQ ID NO: 443, a heterologous polynucleotide and a second ITR with the nucleotide sequence of SEQ ID NO: 444. The transposon may further be flanked by a copy of the tetranucleotide 5′-TTAA-3′ on each side, immediately adjacent to the ITRs and distal to the heterologous polynucleotide. The transposon may further comprise a nucleotide sequence that is at least 95% identical to SEQ ID NO: 441 on one side of the heterologous polynucleotide, and a nucleotide sequence that is at least 95% identical to SEQ ID NO: 442 on the other side of the heterologous polynucleotide. This transposon may be transposed by a corresponding Heliothis transposase comprising a polypeptide sequence at least 90% identical to SEQ ID NO: 522. Preferably the transposase is a hyperactive variant of a naturally occurring transposase. Preferably the hyperactive variant transposase comprises one or more of the following amino acid changes, relative to the sequence of SEQ ID NO: 522: S41V, S41I, S41L, L43S, L43T, V81E, V81D, D83S, D83T, V85L, V851, V85M, P125S, P125T, Q126S, Q126T, Q131R, Q131K, Q131T, Q131S, S136V, S136I, S136L, S136M, E140C, E140A, N151Q, K169E, K169D, N212S, I239L, I239V, I239M, H241N, H241Q, T268D, T268E, T297C, M300R, M300K, M305N, M305Q, L312I, C316A, C316M, L321V, L321M, N322T, N322S, P351G, H357R, H357K, H357D, H357E, K360Q, K360N, E379P, K397S, K397T, Y421F, Y421W, V450I, V450L, V450M, Y495F, Y495W, A447N, A447D, A449S, A449V, K476L, V492A, I500M, L585K and T595K.

[0105] An advantageous piggyBac-like transposon for modifying the genome of a cultured mammalian cell is an Oryzias transposon comprising an ITR with the nucleotide sequence of SEQ ID NO: 564, a heterologous polynucleotide and a second ITR with the nucleotide sequence of SEQ ID NO: 447. The transposon may further be flanked by a copy of the tetranucleotide 5′-TTAA-3′ on each side, immediately adjacent to the ITRs and distal to the heterologous polynucleotide. The transposon may further comprise a nucleotide sequence that is at least 95% identical to SEQ ID NO: 445 on one side of the heterologous polynucleotide, and a nucleotide sequence that is at least 95% identical to SEQ ID NO: 446 on the other side of the heterologous polynucleotide. This transposon may be transposed by a corresponding Oryzias transposase comprising a polypeptide sequence at least 90% identical to SEQ ID NO: 523. Preferably the transposase is a hyperactive variant of a naturally occurring transposase. Preferably the hyperactive variant transposase comprises one or more of the following amino acid changes, relative to the sequence of SEQ ID NO: 523: E22D, A124C, Q131D, Q131E, L138V, L138I, L138M, D160E, Y164F, Y164W, I167L, I167V, I167M, T202R, T202K, I206L, I206V, I206M, I210L, I210V, I210M, N214D, N214E, V253I, V253L, V253M, V258L, V258I, V258M, A284L, A284I, A284M, A284V, V386I, V386M, V386L, M400L, M400I, M400V, S408E, S408D, L409I, L409V, L409M, V458L, V458M, V458I, V467I, V467M, V467L, L468I, L468V, L468M, A514R, A514K, V515I, V515M, V515L, R548K, D549K, D549R, D550R, D550K, S551K and S551R

[0106] An advantageous piggyBac-like transposon for modifying the genome of a cultured mammalian cell is an Agrotis transposon comprising an ITR with the nucleotide sequence of SEQ ID NO: 452, a heterologous polynucleotide and a second ITR with the nucleotide sequence of SEQ ID NO: 453. The transposon may further be flanked by a copy of the tetranucleotide 5′-TTAA-3′ on each side, immediately adjacent to the ITRs and distal to the heterologous polynucleotide. The transposon may further comprise a nucleotide sequence that is at least 95% identical to SEQ ID NO: 450 on one side of the heterologous polynucleotide, and a nucleotide sequence that is at least 95% identical to SEQ ID NO: 451 on the other side of the heterologous polynucleotide. This transposon may be transposed by a corresponding Agrotis transposase comprising a polypeptide sequence at least 90% identical to SEQ ID NO: 524. Preferably the transposase is a hyperactive variant of a naturally occurring transposase.

[0107] An advantageous piggyBac-like transposon for modifying the genome of a cultured mammalian cell is a Helicoverpa transposon comprising an ITR with the nucleotide sequence of SEQ ID NO: 456, a heterologous polynucleotide and a second ITR with the nucleotide sequence of SEQ ID NO: 457. The transposon may further be flanked by a copy of the tetranucleotide 5′-TTAA-3′ on each side, immediately adjacent to the ITRs and distal to the heterologous polynucleotide. The transposon may further comprise a nucleotide sequence that is at least 95% identical to SEQ ID NO: 454 on one side of the heterologous polynucleotide, and a nucleotide sequence that is at least 95% identical to SEQ ID NO: 455 on the other side of the heterologous polynucleotide. This transposon may be transposed by a corresponding Helicoverpa transposase comprising a polypeptide sequence at least 90% identical to SEQ ID NO: 525. Preferably the transposase is a hyperactive variant of a naturally occurring transposase.

[0108] An advantageous Mariner transposon for modifying the genome of a mammalian cell is a Sleeping Beauty transposon, for example one that comprises an ITR with the nucleotide sequence of SEQ ID NO: 460, a heterologous polynucleotide and a second ITR with the nucleotide sequence of SEQ ID NO: 461. An advantageous Mariner transposon for modifying the genome of a mammalian cell comprises a first transposon end with at least 90% sequence identity to SEQ ID NO: 458, and a second transposon end with at least 90% sequence identity to SEQ ID NO: 459. This transposon may be transposed by a corresponding Sleeping Beauty transposase comprising a polypeptide sequence at least 90% identical to SEQ ID NO: 464, including hyperactive variants thereof.

[0109] An advantageous hAT transposon for modifying the genome of a mammalian cell is a TcBuster transposon, for example one that comprises an ITR with the nucleotide sequence of SEQ ID NO: 528, a heterologous polynucleotide and a second ITR with the nucleotide sequence of SEQ ID NO: 529. An advantageous hAT transposon for modifying the genome of a mammalian cell comprises a first transposon end with at least 90% sequence identity to SEQ ID NO: 526, and a second transposon end with at least 90% sequence identity to SEQ ID NO: 527. This transposon may be transposed by a corresponding TcBuster transposase comprising a polypeptide sequence at least 90% identical to SEQ ID NO: 530, including hyperactive variants thereof.

[0110] A transposase protein can be introduced into a cell as a protein or as a nucleic acid encoding the transposase, for example as a ribonucleic acid, including mRNA or any polynucleotide recognized by the translational machinery of a cell; as DNA, e.g. as extrachromosomal DNA including episomal DNA; as plasmid DNA, or as viral nucleic acid. Furthermore, the nucleic acid encoding the transposase protein can be transfected into a cell as a nucleic acid vector such as a plasmid, or as a gene expression vector, including a viral vector. The nucleic acid can be circular or linear. DNA encoding the transposase protein can be stably inserted into the genome of the cell or into a vector for constitutive or inducible expression. Where the transposase protein is transfected into the cell or inserted into the vector as DNA, the transposase encoding sequence is preferably operably linked to a heterologous promoter. There are a variety of promoters that could be used including constitutive promoters, tissue-specific promoters, inducible promoters, species-specific promoters, cell-type specific promoters and the like. All DNA or RNA sequences encoding transposase proteins are expressly contemplated. Alternatively, the transposase may be introduced into the cell directly as protein, for example using cell-penetrating peptides (e.g. as described in Ramsey and Flynn, 2015. Pharmacol. Ther. 154: 78-86 “Cell-penetrating peptides transport therapeutics into cells”); using small molecules including salt plus propanebetaine (e.g. as described in Astolfo et. al., 2015. Cell 161: 674-690); or electroporation (e.g. as described in Morgan and Day, 1995. Methods in Molecular Biology 48: 63-71 “The introduction of proteins into mammalian cells by electroporation”).

### 5.2.3 Promoter Elements

[0111] Systems for expression of polypeptides or amiRNAs in cultured mammalian cells comprise a polynucleotide to be transferred to a host cell. The polynucleotide comprises a promoter that is active in the cultured mammalian cell, operably linked to a heterologous sequence to be expressed. Advantageous gene transfer polynucleotides for the expression of amiRNAs in mammalian cells comprise a Pol II promoter such as an EF1a promoter from any mammalian or avian species including human, rat, mice, chicken and Chinese hamster, (for example a nucleotide sequence selected from SEQ ID NOS: 310-331); a promoter from the immediate early genes 1, 2 or 3 of cytomegalovirus (CMV) from either human, primate or rodent cells (for example a nucleotide sequence selected from SEQ ID NOS: 332-343); a promoter for eukaryotic elongation factor 2 (EEF2) from any mammalian or avian species including human, rat, mice, chicken and Chinese hamster, (for example a nucleotide sequence selected from SEQ ID NOS: 344-354); a Glyceraldehyde 3-phosphate dehydrogenase (GAPDH) promoter from any mammalian or yeast species (for example a nucleotide sequence selected from SEQ ID NOS: 365-381), an actin promoter from any mammalian or avian species including human, rat, mice, chicken and Chinese hamster (for example a nucleotide sequence selected from SEQ ID NOS: 355-364); a PGK promoter from any mammalian or avian species including human, rat, mice, chicken and Chinese hamster (for example a nucleotide sequence selected from SEQ ID NOS: 382-391), or a ubiquitin promoter (for example nucleotide sequence SEQ ID NO: 392), or a viral promoter such as an HSV-TK promoter or an SV40 promoter (for example a nucleotide sequence selected from SEQ ID NOS: 393-399) operably linked to a multi-hairpin amiRNA sequence. Alternatively, a multi-hairpin amiRNA sequence may be operably linked to a Pol III promoter such as a U6 promoter (for example a nucleotide sequence selected from SEQ ID NOs: 404-408) or an H1 promoter (for example nucleotide sequence SEQ ID NO: 409).

### 5.2.4 Micro RNA Elements

[0112] Small inhibitory RNAs (siRNAs) have been used to reduce the activity of certain genes within mammalian culture cells through RNA interference. An siRNA can be expressed in a cell from a nucleic acid encoding a short hairpin RNA (shRNA) operably linked to a promoter naturally transcribed by RNA polymerase III (a “Pol III promoter”). Naturally occurring shRNAs may also be expressed from nucleic acids operably linked to a promoter naturally transcribed by RNA polymerase II (a “Pol II promoter”). The Pol II promoter is typically responsible for transcription of most protein-encoding genes. The products of natural Pol II-expressible shRNA genes are referred to as microRNAs (miRNAs).

[0113] Expression of targeted shRNAs within mammalian cells can be accomplished by engineering natural miRNAs, replacing the natural guide strand sequence with a sequence complementary to a target mRNA whose expression is to be reduced, thereby creating an artificial miRNA (amiRNA) as described for the miR-30 micro RNA (Zeng et. al., 2002. Both Natural and Designed Micro RNAs Technique Can Inhibit the Expression of Cognate mRNAs When Expressed in Human Cells. Molecular Cell: 9, 1327-1333).

[0114] The reduction in gene expression in mammalian cells that can be achieved through RNA interference using amiRNA is variable. Success is often limited because of the limited efficacy of any single inhibitory RNA. Strategies that have been described to improve the efficacy of RNA interference include the incorporation of mismatches in the intramolecular RNA duplex (Wu et. al., 2011. Improved siRNA/shRNA Functionality by Mismatched Duplex. PLoS ONE 6(12): e28580. doi:10.1371/journal.pone.0028580; Myburgh et. al., 2014. Optimization of Critical Hairpin Features Allows miRNA-based Gene Knockdown Upon Single-copy Transduction. Molecular Therapy-Nucleic Acids 3, e207; doi:10.1038/mtna.2014.58), insertion of spacer regions within the amiRNA genes, between the Pol II promoter and the sequences of the amiRNA hairpins (Rousset et. al., 2019. Optimizing Synthetic miRNA Minigene Architecture for Efficient miRNA Hairpin Concatenation and Multi-target Gene Knockdown. Molecular Therapy-Nucleic Acids 14, 351-363.), and the concatenation of amiRNA hairpins within an amiRNA gene (Sun et al., 2006. Multi-miRNA hairpin method that improves gene knockdown efficiency and provides linked multi-gene knockdown. BioTechniques 41:59-63 doi 10.2144/000112203).

[0115] Although amiRNA genes comprising multiple copies of the same hairpin have been shown to be more effective than amiRNA genes with only a single copy of the hairpin, even with three identical hairpins in a single lentiviral vector, it is difficult to reduce expression of the target gene to less than 10% of normal levels (Sun et al., 2006 ibid, Rousset et. al., 2019 ibid). The other application for genes comprising multiple amiRNA hairpins has been for simultaneous inhibition of multiple genes (Hu et. al., 2009. Construction of an Artificial MicroRNA Expression Vector for Simultaneous Inhibition of Multiple Genes in Mammalian Cells. Int. J. Mol. Sci. 10, 2158-2168; Choi et al, 2015. Mol. Ther. 23, 310-320. “Multiplexing Seven miRNA-Based shRNAs to Suppress HIV Replication”).

[0116] Instead of targeting one sequence in a target mRNA with multiple identical inhibitory RNAs derived from multiple identical hairpins, we have designed amiRNA genes comprising multiple different hairpins, each for the expression of a different inhibitory RNA guide strand complementary to different regions within the same target mRNA. Because the guide strand sequences derived from each hairpin target different areas of the gene, they are essentially independent. Furthermore, the processing of hairpins to produce RISC-associated guide strands is improved if multiple hairpins are contained within the same RNA transcript. In addition, the use of multiple independent guide strands reduces the risk of unwanted off-target effects since it is not necessary to express any individual guide strand at extremely high levels. It is thus advantageous to use a polynucleotide comprising two or three or four or five or more hairpins which will be expressed within a mammalian cell to produce two or three or four or five or more different inhibitory RNA guide strands, each of which is complementary to a different sequence within the same target mRNA. When more than one hairpin for the expression of inhibitory RNA guide strands are operably linked to the same promoter, we refer to them as a multi-hairpin amiRNA gene.

[0117] Instead of designing a new multi-hairpin amiRNA for inhibition of each new target gene, an alternative strategy is to use an existing well characterized multi-hairpin amiRNA with guide RNAs complementary to two or more different target sites within an existing polynucleotide. A cell containing a gene whose expression is to be inhibited is modified so the gene expresses its original mRNA fused to a segment including the target sites of the amiRNA. Optionally, the fusion occurs with a UTR of an mRNA to be inhibited, or corresponding portion of a polynucleotide encoding the mRNA. That is, the fusion can occur within a 3′ UTR between the coding sequence and polyadenylation sequence or within a 5′ UTR.

[0118] Preferably, when integrated into the genome of a mammalian cell, the multi-hairpin amiRNA gene reduces the expression of the target gene to a level lower than the level of expression of the target gene in a mammalian cell whose genome comprises an amiRNA gene comprising a hairpin for expression of a single inhibitory RNA guide strand. Preferably, when integrated into the genomes of a population of mammalian cells, the multi-hairpin amiRNA gene reduces the average expression of the target gene within the population to a level lower than the level of expression of the target gene in a population of mammalian cells whose genomes comprises an amiRNA gene comprising a hairpin for expression of a single inhibitory RNA guide strand. Preferably, when integrated into the genomes of a population of mammalian cells, the multi-hairpin amiRNA gene reduces the expression of the target gene to less than 50% of the natural level in a greater fraction of the population than the fraction of the population in which expression is reduced to less than 50% in a population of mammalian cells whose genomes comprises an amiRNA gene comprising a hairpin for expression of a single inhibitory RNA guide strand. Preferably, when integrated into the genomes of a population of mammalian cells, the multi-hairpin amiRNA gene reduces the expression of the target gene to less than 40% of the natural level in a greater fraction of the population than the fraction of the population in which expression is reduced to less than 40% in a population of mammalian cells whose genomes comprises an amiRNA gene comprising a hairpin for expression of a single inhibitory RNA guide strand. Preferably, when integrated into the genomes of a population of mammalian cells, the multi-hairpin amiRNA gene reduces the expression of the target gene to less than 30% of the natural level in a greater fraction of the population than the fraction of the population in which expression is reduced to less than 30% in a population of mammalian cells whose genomes comprises an amiRNA gene comprising a hairpin for expression of a single inhibitory RNA guide strand. Preferably, when integrated into the genomes of a population of mammalian cells, the multi-hairpin amiRNA gene reduces the expression of the target gene to less than 20% of the natural level in a greater fraction of the population than the fraction of the population in which expression is reduced to less than 20% in a population of mammalian cells whose genomes comprises an amiRNA gene comprising a hairpin for expression of a single inhibitory RNA guide strand. Preferably, when integrated into the genomes of a population of mammalian cells, the multi-hairpin amiRNA gene reduces the expression of the target gene to less than 10% of the natural level in a greater fraction of the population than the fraction of the population in which expression is reduced to less than 10% in a population of mammalian cells whose genomes comprises an amiRNA gene comprising a hairpin for expression of a single inhibitory RNA guide strand. Preferably, when integrated into the genomes of a population of mammalian cells, the multi-hairpin amiRNA gene reduces the expression of the target gene to less than 5% of the natural level in a greater fraction of the population than the fraction of the population in which expression is reduced to less than 5% in a population of cultured mammalian cells whose genomes comprises an amiRNA gene comprising a hairpin for expression of a single inhibitory RNA guide strand. Preferably, the hairpin for expression of the single inhibitor RNA guide strand for comparison with a multihairpin is either of the individual hairpins in the multihairpin. Some multi-hairpins achieve a more than additive level of inhibition compared with their component hairpins expressed under the same conditions. For example, if each individual hairpin of a two-hairpin multi-hairpin results in 10% inhibition, then a 21% or higher level of inhibition by the multi-hairpin under the same conditions is more than additive. Some multi-hairpins of the invention including multiple hairpins to different segments of a target mRNA achieve greater inhibition of a target gene than control multi-hairpins including the same number of hairpins but as tandem copies of the same hairpin, when the same hairpin is any of the component hairpins of a multi-hairpin of the invention. For purposes of such a comparison, a hairpin of the invention and control hairpin are the same except for their respective hairpin compositions and are tested for inhibition in the same circumstances (e.g., expressed from the same promoter and in the same cell type). Preferably a multi-hairpin of the invention achieves greater inhibition of a target gene than control tandem hairpins formed of any one of the component hairpins of the multi-hairpin of the invention.

[0119] Preferably, when integrated into the genome of a mammalian cell, the multi-hairpin amiRNA gene reduces the expression of the target gene to less than 50% or 40% or 30% or 20% or 10% or 5% or 2% or 1% of the natural expression level of the target gene. Such reduction of expression may be detected directly as a reduction in mRNA levels or of protein levels, but it may also be detected as a corresponding decrease in the function or activity for which the target gene is responsible. For example, if the product of the target gene is an intracellular protein, preferably, when integrated into the genome of a mammalian cell, the multi-hairpin amiRNA gene reduces the activity of the product of the target gene within the cell to less than 50% or 40% or 30% or 20% or 10% or 5% or 2% or 1% of the natural activity of the product of the target gene within the cell. If the product of the target gene is an extracellular protein, preferably, when integrated into the genome of a mammalian cell, the multi-hairpin amiRNA gene reduces the activity of the product of the target gene secreted from the cell to less than 50% or 40% or 30% or 20% or 10% or 5% or 2% or 1% of the natural activity of the product of the target gene secreted from the cell. If the product of the target gene is a transmembrane protein such as a receptor protein with a signaling function, preferably, when integrated into the genome of a mammalian cell, the multi-hairpin amiRNA gene reduces signal transduction by the product of the target gene to less than 50% or 40% or 30% or 20% or 10% or 5% or 2% or 1% of the natural signal transduction by the product of the target gene. If normal expression of the target gene results in modification of a product made by the mammalian cell, when the multi-hairpin amiRNA gene is integrated into the genome of a mammalian cell, expression of the target gene is preferably reduced such that less than 50% or 40% or 30% or 20% or 10% or 5% or 2% or 1% of the product made by the mammalian cell is modified by the action of the target gene product. If normal expression of the target gene results in modification of a product made by the mammalian cell, when the multi-hairpin amiRNA gene is integrated into the genome of a mammalian cell, expression of the target gene is preferably reduced such that the extent of product modification resulting from the expression of the target gene is reduced to less than 50% or 40% or 30% or 20% or 10% or 5% or 2% or 1% of the extent to which the product would be modified in the absence of the multi-hairpin amiRNA gene. Product modifications include the proteolytic cleavage, or glycosylation or other post-translational modification of a protein produced by the mammalian cell.

[0120] The guide strand sequence of an amiRNA comprises 19 or 20 or 21 or 22 bases that are complementary to the mRNA of the target gene. The guide strand sequence may be complementary to any part of the mRNA, preferably it is complementary to the 3′ UTR of the mRNA or the 5′ UTR of the mRNA or the coding region of the mRNA. Preferably the 5′ base of the guide strand sequence is a thymine (T). The passenger strand sequence of an amiRNA is complementary to the guide strand sequence. It is often advantageous for appropriate processing of an amiRNA if the passenger strand sequence is not perfectly complementary to the guide strand sequence. Processing is often improved if the passenger strand sequence is mismatched at the base complementary to the 5′ base of the guide strand sequence. A general schematic of an exemplary amiRNA hairpin is shown in FIGS. 1A-B. Preferably the passenger strand sequence comprises a mismatch in complementarity with the guide strand sequence at the base corresponding to the 5′ base of the guide strand sequence (base N₁ in FIG. 1). If the 5′ base of the guide strand sequence is an adenine (A) or thymine (T), the passenger strand sequence preferably comprises a cytosine (C) in the corresponding complementary position (base N′₁ in FIG. 1). If the 5′ base of the guide strand sequence is a cytosine (C) or guanine (G), the passenger strand sequence preferably comprises an adenine (A) in the corresponding complementary position. One, two or three additional mismatches may be incorporated into the passenger strand sequence as mismatched bases, insertions or deletions. Most favorable mismatches are made in the passenger strand sequence that create mismatches at one or more of the corresponding positions complementary to positions 9, 10, 11, 12 or 13 in the guide strand sequence (bases N9, N10, N11, N12 and N13 in FIGS. 1A-B). Most preferably, the passenger strand sequence comprises a mismatch at the base corresponding to position 12 in the guide strand sequence (base N′12 in FIGS. 1A-B). The guide and the passenger strand sequences of an amiRNA are typically separated by an unstructured loop of between 5 and 35 nucleotides (bases L₁-L_{Z} in FIGS. 1A-B.). Preferably the loop comprises a sequence derived from a naturally occurring miRNA, for example a nucleotide sequence selected from SEQ ID NO: 241-250.

[0121] A preferred polynucleotide for the inhibition of a target gene (“the inhibitory polynucleotide”) comprises a multi-hairpin amiRNA gene comprising at least two different amiRNA hairpin sequences whose guide strand sequences are different and are each complementary to a different sequence in the same target mRNA. An mRNA can be subdivided into a 5′ UTR, coding region and 3′ UTR. The target sites for hairpin inhibitors can be in the same or different of these regions. For example, there can be target sites for two hairpins both in the 3′ UTR or one site in the 3′ UTR and another in the coding region. Spacing between target sites can vary from over 5000 nucleotides to overlapping. A preferred spacing is between 5 and 2,000 nucleotides. Spacing is measured as the number of nucleotides between proximate 3′ and 5′ ends of target sites.

[0122] The multi-hairpin amiRNA gene comprises a first (guide strand) sequence of at least 19 or 20 or 21 or 22 contiguous bases that are complementary to the target mRNA and a first (passenger strand) sequence of at least 19 or 20 or 21 or 22 bases that are at least 78% identical to the reverse complement of the first guide strand sequence (i.e. within 19 bases it comprises no more than 4 mismatches, including mutations, single base deletions or single base insertions, relative to the identical reverse complement of the first guide strand sequence). The first guide strand sequence and the first passenger strand sequence are separated by between 5 and 35 bases. The first guide strand sequence, the first passenger strand sequence and the sequence separating them are collectively the first hairpin. The multi-hairpin amiRNA gene further comprises a second (guide strand) sequence of at least 19 or 20 or 21 or 22 contiguous bases that are complementary to the target mRNA and a second (passenger strand) sequence of at least 19 or 20 or 21 or 22 bases that are at least 78% identical to the reverse complement of the second guide strand sequence (i.e. within 19 bases it comprises no more than 4 mismatches, including mutations, single base deletions or single base insertions, relative to the identical reverse complement of the second guide strand sequence). The second guide strand sequence and the second passenger strand sequence are separated by between 5 and 35 bases. The second guide strand sequence, the second passenger strand sequence and the sequence separating them are collectively the second hairpin. The first and second guide strand sequences are different from each other but complementary to the same target mRNA.

[0123] The multi-hairpin amiRNA gene may further comprise a third guide strand sequence of at least 19 or 20 or 21 or 22 bases that is complementary to the target mRNA and a third passenger strand sequence of at least 19 or 20 or 21 or 22 bases that is at least 78% identical to the reverse complement of the third guide strand sequence (i.e. within 19 bases it comprises no more than 4 mismatches, including mutations, single base deletions or single base insertions, relative to the identical reverse complement of the third guide strand sequence). The third guide strand sequence and the third passenger strand sequence are separated by between 5 and 35 bases. The third guide strand sequence, the third passenger strand sequence and the sequence separating them are collectively the third hairpin. The first and second and third guide strand sequences are each complementary to a different region of the same target mRNA.

[0124] The multi-hairpin amiRNA gene further comprises a promoter that is active in mammalian cells, preferably transcribable by RNA polymerase II or RNA polymerase III. Each hairpin is operably linked to the promoter. Preferably the promoter is heterologous to the hairpins. It the promoter is transcribed by RNA polymerase II, it is advantageous for the inhibitory polynucleotide further comprises a spacer polynucleotide that is operably linked to the promoter: the amiRNA hairpins may be placed to the 3′ UTR of the spacer polynucleotide, or they may be placed into an intron that is transcribed by the Pol II promoter. The spacer polynucleotide may comprise an open reading frame encoding an expressible polypeptide, or it may comprise a sequence that does not encode an expressible polypeptide. Preferably the spacer polynucleotide comprises between 50 and 3,000 nucleotides, more preferably the spacer is between 100 and 1,500 nucleotides. Optionally the spacer comprises an open reading frame to be expressed in the mammalian cell, such as a chimeric antigen receptor or a selectable marker. Example spacer polynucleotide sequences are given as SEQ ID NO: 279-284.

[0125] Each hairpin may comprise nucleotide sequences in addition to the guide and passenger strand sequences to enhance the stem-loop structure of the transcribed RNA, in order to increase the chance of processing and loading the guide strand into the RISC complex. A schematic of an exemplary multi-hairpin amiRNA gene is shown in FIGS. 2A-B. Short sequences (between 5 and 20 bases) may be added to the 5′ and 3′ of the guide-loop-passenger hairpin in order to stabilize it and improve processing of the RNA into the RISC complex. These are shown in FIGS. 2A-B as elements A and E stabilizing hairpin 1 and elements G and K stabilizing hairpin 2. For example, short nucleotide sequence SEQ ID NO: 255 may be added to the 5′ side of the guide-loop-passenger hairpin sequence and short nucleotide sequence SEQ ID NO: 256 may be added to the 3′ side of the guide-loop-passenger hairpin sequence to enhance RNA hairpin formation. Alternative exemplary pairs of stem-stabilizing nucleotide sequences that can be added to the 5′ and 3′ of the guide-loop-passenger strand sequence respectively to enhance RNA hairpin formation are SEQ ID NOs: 257 and 258, or SEQ ID NOs: 259 and 260, or SEQ ID NOs: 261 and 262, or SEQ ID NOs: 263 and 264, or SEQ ID NOs: 265 and 266, or SEQ ID NOs: 267 and 268, or SEQ ID NOs: 269 and 270, or a 5′ additional stem with sequence 5′-GTAGCAC-3′ and a 3′ additional stem with sequence 5′-TACTGC-3′. These stem sequences are derived from the nucleotide sequences flanking the guide-loop-passenger hairpin portion of the miRNA sequence in naturally occurring miRNAs. The corresponding sequences from other miRNAs may also be used. Although most of the exemplary sequences given herein have the guide strand sequence preceding the passenger strand sequence, the order may be 5′-guide-loop-passenger-3′ or it may be 5′-passenger-loop-guide-3′, as shown in FIGS. 1A-B. The RNA sequence that is loaded into the RISC complex is not determined by the order in which they occur. It is intended that “guide-loop-passenger” be read as meaning a sequence comprising these three elements in either configuration 5′-guide-loop-passenger-3′ or 5′-passenger-loop-guide-3′.

[0126] It is advantageous to provide some separation between hairpins in a polynucleotide comprising multiple hairpins, to improve the processing of the RNA (see for example element F in FIGS. 2A-B). The sequence separating the hairpins should be relatively unstructured. Exemplary unstructured sequences that may be incorporated between hairpins in an inhibitory polynucleotide include nucleotide sequences SEQ ID NOs: 271-278.

[0127] It is advantageous to provide some unstructured sequence to the 5′ of the first hairpin in an inhibitory polynucleotide. Exemplary unstructured sequences that may be incorporated to the 5′ of the first hairpin an inhibitory polynucleotide include nucleotide sequences SEQ ID NOs: 251-252. It is advantageous to provide some unstructured sequence to the 3′ of the last hairpin in an inhibitory polynucleotide. Exemplary unstructured sequences that may be incorporated to the 3′ of the last hairpin an inhibitory polynucleotide include nucleotide sequences SEQ ID NOs:253-254.

[0128] Although some sequence elements of artificial miRNAs are derived from naturally occurring miRNAs, the combination of guide, loop and passenger strand sequences in each artificial miRNA of the invention, or the combination of guide, loop and passenger strand sequences together with the 5′ and 3′ hairpin-stabilizing sequences in each artificial miRNA of the invention, are not naturally occurring miRNA sequences.

[0129] An exemplary general structure for a multi-hairpin amiRNA gene is shown in FIGS. 2A-B. It comprises (i) a promoter, operably linked to (ii) a spacer sequence preferably of between 50 and 3,000 nucleotides; (iii) an unstructured sequence, optionally from the 5′ region of a naturally occurring miRNA; (iv) a first hairpin comprising (a) a first 5′ stem sequence (FIGS. 2A-B, element A) which may optionally be derived from the 5′ stem (but preferably not the guide or passenger strand sequence) of a naturally occurring miRNA; (b) a first guide (or passenger) strand sequence (FIGS. 2A-B, element B); (c) a first loop sequence (FIGS. 2A-B, element C); (d) a first passenger (if the sequence in (b) was a guide strand sequence) or guide (if the sequence in (b) was a passenger strand sequence) strand sequence (FIGS. 2A-B, element D); (e) a first 3′ stem sequence (FIGS. 2A-B, element E) which may optionally be derived from the 3′ stem (but preferably not the guide or passenger strand sequence) of a naturally occurring miRNA, and wherein the first 5′ stem sequence and the first 3′ stem sequence increase the stability of the hairpin formed by the first guide strand sequence and the first passenger strand sequence; (v) optionally an unstructured sequence to separate the first hairpin from the second hairpin (FIGS. 2A-B, element F); (vi) a second hairpin comprising (f) a second 5′ stem sequence (FIGS. 2A-B, element G) which may optionally be derived from the 5′ stem (but preferably not the guide or passenger strand sequence) of a naturally occurring miRNA; (g) a second guide (or passenger) strand sequence (FIGS. 2A-B, element H); (h) a second loop sequence (FIGS. 2A-B, element I); (j) a second passenger (if the sequence in (g) was a guide strand sequence) or guide (if the sequence in (g) was a passenger strand sequence) strand sequence (FIGS. 2A-B, element J); (k) a second 3′ stem sequence (FIGS. 2A-B, element K) which may optionally be derived from the 3′ stem (but preferably not the guide or passenger strand sequence) of a naturally occurring miRNA, and wherein the second 5′ stem sequence and the second 3′ stem sequence increase the stability of the hairpin formed by the second guide strand sequence and the second passenger strand sequence; and wherein the first guide strand sequence and the second guide strand sequence are complementary to the same target mRNA expressed from an endogenous mammalian cell gene, and the first and second guide strand sequences are different from each other.

[0130] The inhibitory polynucleotide may be incorporated into cultured mammalian cells either on a transient vector, on a viral vector such as an adenovirus associated viral vector (an AAV vector), on a lentiviral vector or on a vector that integrates into the cell's genome through a process of random integration. The number of copies of an inhibitory polynucleotide comprising a multi-hairpin amiRNA gene that are integrated into the genome of a cultured mammalian cell may be increased by incorporating it into a transposon and then using a corresponding transposase to insert multiple copies of the transposon into the mammalian cell genome. An advantageous inhibitory polynucleotide comprises two transposon ends, as described in Section 5.2.2.

[0131] An inhibitory polynucleotide comprising a multi-hairpin amiRNA gene flanked by transposon ends may be stably integrated into the genome of a eukaryotic cell by introducing into the eukaryotic cell the transposon and a corresponding transposase (as described in Section 5.2.2), either as a transposase protein or as a polynucleotide encoding the transposase. Optionally the inhibitory polynucleotide may further comprise a selectable marker, which may be used to identify cells whose genome comprises the inhibitory polynucleotide and the multi-hairpin amiRNA gene. These cells may also be tested phenotypically to determine the degree by which expression of the target mRNA has been reduced. In some cases, inhibition of the target mRNA may result in a selectable phenotype.

[0132] Although it is preferable to incorporate two or more amiRNA hairpins to express guides complementary to the same target mRNA into a single polynucleotide, one can alternatively express two or more amiRNA guides complementary to different target sites of the same target mRNA within the same by using two separate inhibitory polynucleotides, providing that both polynucleotides become integrated into the genome of the cultured mammalian cell. Preferably the inhibitory polynucleotides comprise transposon ends or lentiviral repeats. A cultured mammalian cell whose genome comprises a first and second amiRNA hairpin, wherein the first and second guide strand sequences are complementary to first and second target sites of the same mRNA, and wherein the first and second guide strand sequences are different from each other is also an aspect of the invention. Preferably the expression of a target gene encoding the mRNA is reduced to a level lower than the level of expression of the target gene in a cultured mammalian control cell whose genome comprises only the first or the second amiRNA hairpin.

[0133] A cell whose genome comprises an inhibitory polynucleotide comprising a multi-hairpin amiRNA may have permanently reduced or eliminated activity of the gene encoded by the target mRNA. Such a cell is then useful and valuable for producing molecules that would otherwise be modified as a result of the direct or indirect action of the target mRNA. Such produced molecules may include proteins, sugars, metabolites, and other cellular products. Mammalian cell phenotypes that may be modified by inhibitory polynucleotides include the glycosylation of proteins, the intracellular trafficking of proteins, the proteolytic cleavage of proteins, the requirement for particular nutrients to be provided in order for the cell to grow, and the ability of the cell to survive under various conditions. Immune cell phenotypes that may be modified by inhibitory polynucleotides include the proliferation, survival, longevity, anergy and exhaustion of the immune cell.

### 5.2.5 Insulator Elements

[0134] When a heterologous polynucleotide is integrated into the genome of a mammalian cell, it is often desirable to prevent genetic elements within the heterologous polynucleotide from influencing expression of endogenous immune cell genes. Similarly, it is often desirable to prevent genes within the heterologous polynucleotide from being influenced by elements in the immune cell genome, for example from being silenced by incorporation into heterochromatin. Insulator elements are known to have enhancer-blocking activity (helping to prevent the genes in the heterologous polynucleotide from influencing the expression of endogenous immune cell genes) and barrier activity (helping to prevent genes within the heterologous polynucleotide from being silenced by incorporation into heterochromatin). Enhancer-blocking activity can result from binding of transcriptional repressor CTCF protein. Barrier activity can result from binding of vertebrate barrier proteins such as USF1 and VEZF1. Useful insulator sequences comprise binding sites for CTCF, USF1 or VEZF1. An advantageous gene transfer system comprises a polynucleotide comprising an insulator sequence comprising a binding site for CTCF, USF1 or VEZF1. More preferably a gene transfer system comprises a polynucleotide comprising two insulator sequences, each comprising a binding site for CTCF, USF1 or VEZF1, wherein the two insulator sequences flank any promoters or enhancers within the heterologous polynucleotide. Advantageous examples of insulator nucleotide sequences are SEQ ID NOs: 410-416.

[0135] If a heterologous polynucleotide comprising a promoter or enhancer is integrated into the genome of a mammalian cell without insulator sequences, there is a risk that either the promoter or enhancer elements within the heterologous polynucleotide will influence expression of endogenous immune cell genes (for example oncogenes), or that promoter or enhancer elements within the heterologous polynucleotide will be silenced by incorporation into heterochromatin. When a heterologous polynucleotide is integrated into a target genome following random fragmentation, some genetic elements are often lost, and others may be rearranged. There is thus a significant risk that, if the heterologous polynucleotide comprises insulator elements flanking enhancer and promoter elements, the insulator elements may be rearranged or lost, and the enhancer and promoter elements may be able to influence and be influenced by the genomic environment into which they integrate. It is therefore advantageous to use a transposon gene transfer system, wherein the entire sequence between the two transposon ITRs is integrated, without rearrangement, into the mammalian cell genome. Advantageous gene transfer systems for integration into mammalian cell genomes thus comprise a transposon in which elements are arranged in the following order: left transposon end; a first insulator sequence; sequences for expression within the immune cell; a second insulator sequence; right transposon end. The sequences for expression within the mammalian cell may include any number of regulatory sequences operably linked to any number of open reading frames.

### 5.2.6 Selection of Target Cells Comprising Polynucleotides

[0136] A target cell whose genome comprises a stably integrated polynucleotide may be identified, if the polynucleotide comprises a gene encoding a selectable marker, by exposing the target cells to conditions that favor cells expressing the selectable marker (“selection conditions”). It may therefore be advantageous for a polynucleotide to comprise a gene encoding a selectable marker.

[0137] One class of selectable markers that may be advantageously incorporated into a polynucleotide are those that provide a growth advantage to the cell by allowing a cell to survive in the presence of a harmful substance such as an antibiotic, enzyme inhibitor or cellular poison such as neomycin (resistance conferred by an aminoglycoside 3′-phosphotransferase e.g. a polypeptide with sequence selected from SEQ ID NOs: 294-297), puromycin (resistance conferred by puromycin acetyltransferase e.g. a polypeptide with sequence selected from SEQ ID NOs: 300-302), blasticidin (resistance conferred by a blasticidin acetyltransferase and a blasticidin deaminase e.g. a polypeptide with sequence SEQ ID NO: 303), hygromycin B (resistance conferred by hygromycin B phosphotransferase e.g. a polypeptide with sequence selected from SEQ ID NO: 298-299 and zeocin (resistance conferred by a binding protein encoded by the ble gene, for example a polypeptide with sequence SEQ ID NO: 291).

[0138] Another class of selectable markers that may be advantageously incorporated into a polynucleotide are those that provide a growth advantage to the cell by allowing the cell to synthesize a metabolically useful substance. One example of such a selectable marker is glutamine synthetase (GS, for example a polypeptide with sequence selected from SEQ ID NOs: 304-308) which allows selection via glutamine metabolism. Glutamine synthase is the enzyme responsible for the biosynthesis of glutamine from glutamate and ammonia, it is a crucial component of the only pathway for glutamine formation in a mammalian cell. In the absence of glutamine in the growth medium, the GS enzyme is essential for the survival of mammalian cells in culture. Some cell lines, for example mouse myeloma cells do not express enough GS enzyme to survive without added glutamine. In these cells a transfected GS gene can function as a selectable marker by permitting growth in a glutamine-free medium. In other cell lines, for example Chinese hamster ovary (CHO) cells express enough GS enzyme to survive without exogenously added glutamine. These cell lines can be manipulated by genome editing techniques including CRISPR/Cas9 to reduce or eliminate the activity of the GS enzyme. In all these cases, GS inhibitors such as methionine sulphoximine (MSX) can be used to inhibit a cell's endogenous GS activity. Selection protocols include introducing a polynucleotide comprising sequences encoding a first polypeptide and a glutamine synthase selectable marker, and then treating the cell with inhibitors of glutamine synthase such as methionine sulphoximine. The higher the levels of methionine sulphoximine that are used, the higher the level of glutamine synthase expression is required to allow the cell to synthesize enough glutamine to survive. Some of these cells will also show an increased expression of the first polypeptide.

[0139] Preferably the GS gene is operably linked to a weak promoter or other sequence elements that attenuate expression as described herein, such that high levels of expression can only occur if many copies of the polynucleotide are present, or if they are integrated in a position in the genome where high levels of expression occur. In such cases it may be unnecessary to use the inhibitor methionine sulphoximine: simply synthesizing enough glutamine for cell survival may provide a sufficiently stringent selection if expression of the glutamine synthetase is attenuated.

[0140] Another example of a selectable marker gene that may be advantageously incorporated into a polynucleotide to provide a growth advantage to the cell by allowing the cell to synthesize a metabolically useful substance is a gene encoding dihydrofolate reductase (DHFR, for example a polypeptide with sequence selected from SEQ ID NO: 292-293) which is required for catalyzing the reduction of 5,6-dihydrofolate (DHF) to 5,6,7,8-tetrahydrofolate (THF). Some cell lines do not express enough DHFR to survive without added hypoxanthine and thymidine (HT). In these cells a transfected DHFR gene can function as a selectable marker by permitting growth in a hypoxanthine and thymidine-free medium. DHFR-deficient cell lines, for example Chinese hamster ovary (CHO) cells can be produced by genome editing techniques including CRISPR/Cas9 to reduce or eliminate the activity of the endogenous DHRF enzyme. DHFR confers resistance to methotrexate (MTX). DHFR can be inhibited by higher levels of methotrexate. Selection protocols include introducing a construct comprising sequences encoding a first polypeptide and a DHFR selectable marker into a cell with or without an endogenous DHFR gene, and then treating the cell with inhibitors of DHFR such as methotrexate. The higher the levels of methotrexate that are used, the higher the level of DHFR expression is required to allow the cell to synthesize enough DHFR to survive. Some of these cells will also show an increased expression of the first polypeptide. Preferably the DHFR gene is operably linked to a weak promoter or other sequence elements that attenuate expression as described above, such that high levels of expression can only occur if many copies of the polynucleotide are present, or if they are integrated in a position in the genome where high levels of expression occur.

[0141] Another class of selectable markers include those that may be visually detected and then selected, but which do not provide any inherent growth advantage to the cell. Examples include fluorescent or chromogenic proteins (such as genes encoding GFP, RFP etc.) which can be selected for example using flow cytometry. Other selectable markers which do not provide any inherent growth advantage to the cell include genes encoding transmembrane proteins that can bind to a second molecule (protein or small molecule) that can be fluorescently labelled so that the presence of the transmembrane protein can be selected using flow cytometry. Other selectable markers which do not provide any inherent growth advantage to the cell include genes encoding luciferases.

[0142] High levels of expression may be obtained from genes encoded on polynucleotides that are integrated at regions of the genome that are highly transcriptionally active, or that are integrated into the genome in multiple copies, or that are present extrachromosomally in multiple copies. It is often advantageous to operably link the gene encoding the selectable marker to expression control elements that result in low levels of expression of the selectable polypeptide from the polynucleotide and/or to use conditions that provide more stringent selection. Under these conditions, for the expression cell to produce sufficient levels of the selectable polypeptide encoded on the polynucleotide to survive the selection conditions, the polynucleotide must either be present in a favorable location in the cell's genome for high levels of expression, or a sufficiently high number of copies of the polynucleotide must be present, such that these factors compensate for the low levels of expression achievable because of the expression control elements.

[0143] Genomic integration of transposons in which a selectable marker is operably linked to regulatory elements that only weakly express the marker usually requires that the transposon be inserted into the target genome by a transposase. By operably linking the selectable marker to elements that result in weak expression, cells are selected which either incorporate multiple copies of the transposon, or in which the transposon is integrated at a favorable genomic location for high expression. Using a gene transfer system that comprises a transposon and a corresponding transposase increases the likelihood that cells will be produced with multiple copies of the transposon, or in which the transposon is integrated at a favorable genomic location for high expression. Gene transfer systems comprising a transposon and a corresponding transposase are thus particularly advantageous when the transposon comprises a selectable marker operably linked to weak promoters.

[0144] A gene to be expressed from the polynucleotide may be included on the same polynucleotide as the selectable marker, with the two genes operably linked to different promoters. In this case low expression levels of the selectable marker may be achieved by using a weakly active constitutive promoter such as the phosphoglycerokinase (PGK) promoter (such as a promoter with nucleotide sequence selected from SEQ ID NOS: 382-391), the Herpes Simplex Virus thymidine kinase (HSV-TK) promoter (e.g. nucleotide sequence SEQ ID NO: 394), the MC1 promoter (for example nucleotide sequence SEQ ID NO: 395), the ubiquitin promoter (for example nucleotide sequence SEQ ID NO: 392). Other weakly active promoters maybe deliberately constructed, for example a promoter attenuated by truncation, such as a truncated promoter from simian virus 40 (SV40) (for example a nucleotide sequence selected from SEQ ID NO: 396-397), or a truncated HSV-TK promoter (for example nucleotide sequence SEQ ID NO: 393 or 399).

[0145] Expression of the selectable marker may also be reduced by destabilizing the mRNA, for example by incorporating amiRNA hairpins into the 3′UTR of the selectable marker. Insertion of multiple miRNA hairpins into the 3′ UTR of a GFP gene may reduce expression of the GFP, even though the miRNA is not targeting the GFP (Sun et al., 2006. Multi-miRNA hairpin method that improves gene knockdown efficiency and provides linked multi-gene knockdown. BioTechniques 41:59-63 doi 10.2144/000112203). This is likely because miRNA processing removes the stabilizing 3′UTR structures such as the polyA tail of the gene.

[0146] Expression levels of a selectable marker may be advantageously reduced by the insertion of miRNA hairpin sequences into the 3′ UTR of the gene encoding the selectable marker. For a selectable marker that encodes a protein that provides an essential nutrient to the cell, for example a gene encoding glutamine synthetase or a gene encoding dihydrofolate reductase, expression of the selectable marker must exceed a threshold level in order to provide enough of the essential nutrient to the cell, and thus for the cell to survive restrictive conditions (for example withdrawal of the essential nutrient from the media). Similarly if the selectable marker encodes a protein that provides a resistance mechanism to an inhibitory molecule, for example a protein that confers resistance to an antibiotic such as puromycin, neomycin/G418, blasticidin, hygromycin or zeocin, expression of the selectable marker must exceed a threshold level in order to enable the cell to survive restrictive conditions (for example the presence of a certain level of antibiotic in the media). If expression of the selectable marker is attenuated to below this threshold level, for example by the placement of miRNA hairpins into the 3′UTR of the selectable marker open reading frame, cells will only survive if they are able to increase expression of the selectable marker to above the threshold level. One way that this can be achieved is if a cell contains a higher number of copies of the selectable marker, so that the sum of expression of all copies allows the cell to exceed the needed threshold level of expression of the selectable marker. Typically, a higher number of copies of the selectable marker will be accompanied by a higher number of copies of all other genes on the polynucleotide comprising the selectable marker. A higher number of copies of these genes will result in higher levels of expression of these genes. Thus attenuation of a selectable marker by incorporation of miRNA hairpins into the 3′UTR following the selectable marker ORF will increase the expression of other genes encoded on the same polynucleotide.

[0147] An example in which inclusion of amiRNA hairpins in the 3′UTR of a gene encoding a metabolic enzyme increases the yield of another gene encoded on the same polynucleotide is shown in Sections 6.1.2.1 and 6.1.2.2. Inclusion of 2 or 3 amiRNA hairpins results in substantially higher expression levels of the other genes encoded on the polynucleotide than does inclusion of a single amiRNA hairpin. This is because inclusion of more than one hairpin Two and three hairpins are also more effective at inhibiting their target gene. An advantageous polynucleotide comprises a gene encoding a selectable marker operably linked to a Pol II promoter, and further comprises a first and second amiRNA hairpin in the 3′UTR of the selectable marker.

[0148] Preferably the first amiRNA hairpin comprises a first guide strand sequence of at least 19 or 20 or 21 or 22 contiguous bases complementary to an mRNA target, and the second amiRNA hairpin comprises a second guide strand sequence of at least 19 or 20 or 21 or 22 contiguous bases complementary to a different sequence within the same mRNA target as the first guide strand sequence. Preferably the first guide strand sequence is different from the second guide strand sequence. Optionally the polynucleotide comprises a third amiRNA hairpin in the 3′UTR of the selectable marker wherein the third amiRNA hairpin comprises a third guide strand sequence of at least 19 or 20 or 21 or 22 contiguous bases complementary to a different sequence within the same mRNA target, and wherein the third guide strand sequence is different from the first and second guide strand sequences. Preferably the selectable marker provides a growth advantage to the cell, for example by allowing the cell to synthesize a metabolically useful substance, or to survive in the presence of a harmful substance such as an antibiotic, enzyme inhibitor or cellular poison. Preferably the selectable marker is other than a fluorescent protein or chromogenic protein or a protein that catalyzes a fluorogenic or chromogenic reaction and that does not directly benefit the cell.

[0149] An advantageous selectable marker gene comprises an open reading frame encoding a polypeptide with sequence at least 90% identical to a sequence selected from SEQ ID NOs: 291-308, operably linked to a weak promoter, for example a nucleotide sequence selected from SEQ ID NOs: 382-399. Optionally there is an attenuating 5′UTR between the promoter and the glutamine synthetase open reading frame, for example a nucleotide sequence selected from SEQ ID NOs: 400-403. The 3′ UTR of the selectable marker gene comprises a multi-hairpin amiRNA sequence between the open reading frame and the polyadenylation sequence. Preferably the selectable marker gene is part of a transposon, transposable by a corresponding transposase.

[0150] The use of transposons and transposases in conjunction with weakly expressed selectable markers has several advantages over non-transposon constructs. One is that linkage between expression of the selectable marker and other genes on the transposon is very high, because a transposase will integrate the entire sequence that lies between the two transposon ends into the genome. In contrast when heterologous DNA is introduced into the nucleus of a eukaryotic cell, for example a mammalian cell, it is gradually broken into random fragments which may either be integrated into the cell's genome or degraded. Thus, if a polynucleotide comprising sequences to be expressed and a selectable marker is introduced into a population of cells, some cells will integrate the sequences encoding the selectable marker but not those encoding the other sequences to be expressed, and vice versa. In these circumstances, selection of cells expressing high levels of selectable marker is thus only somewhat correlated with cells that also express high levels of the other genes to be expressed. In contrast, because the transposase integrates all of the sequences between the transposon ends, cells expressing high levels of selectable marker are highly likely to also express high levels of the other genes to be expressed.

[0151] A second advantage of transposons and transposases is that they are much more efficient at integrating DNA sequences into the genome. A much higher fraction of the cell population is therefore likely to integrate one or more copies of a polynucleotide into their genomes, so there will be a correspondingly higher likelihood of good stable expression of both the selectable marker and the first polypeptide.

[0152] A third advantage of piggyBac-like transposons and transposases is that piggyBac-like transposases are biased toward inserting their corresponding transposons into transcriptionally active chromatin. Each cell is therefore likely to integrate the polynucleotide into a region of the genome from which genes are well expressed, so there will be a correspondingly higher likelihood of good stable expression of both the selectable marker and the first polypeptide.

### 5.3 Micro RNA for Inhibiting Fucosylation of Secreted Proteins

[0153] Fucosylation of antibodies inhibits antibody-dependent cell-mediated cytotoxicity (ADCC). Attempts have therefore been made to use RNA interference to reduce core fucosylation in cultured mammalian cells, including by targeting fucosyl transferase 8 (FUT8) the enzyme that catalyzes the transfer of α1,6-linked fucose to the first N-acetylglucosamine in N-linked glycans. Mori et. al. identified two siRNAs directed against FUT8 that resulted in 60% of a secreted antibody being afucosylated, compared with 10% afucosylated in the absence of siRNA (Mori et. al., 2004. Engineering Chinese hamster ovary cells to maximize effector function of produced antibodies using FUT8 siRNA. Biotechnol Bioeng. 88:901-8.). Beuger et. al. identified a FUT8-targeting shRNA that could produce as much as 88% afucosylated antibody (Beuger et. al., 2009. Short-hairpin-RNA-mediated silencing of fucosyltransferase 8 in Chinese-hamster ovary cells for the production of antibodies with enhanced antibody immune effector function. Biotechnol Appl Biochem. 53:31-7). U.S. Pat. Nos. 6,946,292, 7,737,325, 7,749,753, 7,846,725 and 8,003,781 describe strategies of inhibiting one or more genes in the fucosylation pathway including GDP-Mannose 4,6-dehydratase (GMD), alpha-(1,6)-fucosyl transferase (FUT8) and GDP-fucose transporter 1 (GFT) using RNA interference. Imai-Nishiya et. al. designed a pair of siRNA molecules targeting FUT8 and GDP-mannose 4,6-dehydratase (GMD) which was able to completely abolish fucosylation providing no fucose were present in the media (Imai-Nishiya et. al., 2007. Double knockdown of α1,6-fucosyltransferase (FUT8) and GDP-mannose 4,6-dehydratase (GMD) in antibody-producing cells: a new strategy for generating fully non-fucosylated therapeutic antibodies with enhanced ADCC. BMC Biotechnology 2007, 7:84). However, the presence of fucose compromises the synergistic effect of knocking down these two genes. Natural microRNAs that target FUT8, including miR-122 and miR-34a, have also been identified (Bernardi C. et. al., 2013. Effects of MicroRNAs on Fucosyltransferase 8 (FUT8) Expression in Hepatocarcinoma Cells. PLoS ONE 8(10): e76540. https.//doi.org/10.1371/journal.pone.0076540), though the effects of these microRNAs were modest.

[0154] In many of the RNA interference examples given above, cells with high levels of afucosylation were selected by treating the cells with a fucose-specific lectin such as Lens culinaris agglutinin that kills cells with fucosylated surface molecules. This is because the effectiveness of any individual siRNA sequence is less than 100%, and when genes expressing the siRNAs are introduced into cells, variation in expression levels leads to significant cell-to-cell variability. To overcome these limitations, we designed multi-hairpin amiRNA genes comprising one, two or more guide strand sequences complementary to different sequences within the same mRNA target (the mRNA for FUT8). We also used a piggyBac-like transposon vector to ensure that the amiRNA genes were integrated into transcriptionally active regions of the genome.

[0155] Examples described in Section 6.1.1 (including Sections 6.1.1.1, 6.1.1.2 and 6.1.1.3) show that integration into the CHO genome of a transposon comprising multi-hairpin amiRNAs with guide strand sequences complementary to the 3′ UTR of CHO FUT8 resulted in a complete lack of fucose (detected by highly sensitive mass spectroscopy) on antibodies produced by the cells. In contrast to previously reported methods, no subsequent lectin-based selection to kill cells that were still producing fucosylated proteins was necessary. Cells were selected only for incorporation of the transposon comprising the multi-hairpin amiRNA gene into the genome. By combining the effectiveness of multiple guide strand sequences targeting multiple different sequences within the same target mRNA, with highly efficient transposase-catalyzed transposon integration into the mammalian genome, the result was elimination of detectable target enzyme expression within the entire population of cells without further selection steps. Each multi-hairpin amiRNA sequence used in these examples comprised a first guide strand sequence comprising a contiguous 19 or 20 or 21 or 22 nucleotide sequence complementary to SEQ ID NO: 1 and a first passenger strand sequence comprising a contiguous 19 or 20 or 21 or 22 nucleotide sequence that is at least 78% identical to the reverse complement of the first guide strand sequence. Each multi-hairpin amiRNA sequence further comprised a second guide strand sequence comprising a contiguous 19 or 20 or 21 or 22 nucleotide sequence complementary to SEQ ID NO: 1 and a second passenger strand sequence comprising a contiguous 19 or 20 or 21 or 22 nucleotide sequence that is at least 78% identical to the reverse complement of the second guide strand sequence, and wherein the first and second guide strand sequences are different from each other. Each multi-hairpin amiRNA sequence further comprised a third guide strand sequence comprising a contiguous 19 or 20 or 21 or 22 nucleotide sequence complementary to SEQ ID NO: 1 and a third passenger strand sequence comprising a contiguous 19 or 20 or 21 or 22 nucleotide sequence that is at least 78% identical to the reverse complement of the third guide strand sequence, and wherein the first, second and third guide strand sequences are all different from each other. Each guide strand sequence was separated from its respective passenger strand sequence by between 5 and 35 bases. For multi-hairpin amiRNA genes with nucleotide sequences SEQ ID NOs 193 and 194, each guide strand sequence was separated from its respective passenger strand sequence by a nucleotide sequence comprising SEQ ID NO: 241. For multi-hairpin amiRNA gene with nucleotide sequence SEQ ID NO 195, each guide strand sequence was separated from its respective passenger strand sequence by a nucleotide sequence comprising SEQ ID NO: 242.

[0156] An advantageous polynucleotide for inhibition of fucosylation in Cricetulus griseus cells comprises or encodes a FUT8-inhibiting multi-hairpin amiRNA sequence. FUT8 is an alpha-(1,6)-fucosyltransferase. The FUT8-inhibiting multi-hairpin amiRNA sequence comprises a first guide strand sequence comprising a contiguous 19 or 20 or 21 or 22 nucleotide sequence complementary to SEQ ID NO: 1 and a first passenger strand sequence comprising a contiguous 19 or 20 or 21 or 22 nucleotide sequence that is at least 78% identical to the reverse complement of the first guide strand sequence. The FUT8-inhibiting multi-hairpin amiRNA sequence further comprises a second guide strand sequence comprising a contiguous 19 or 20 or 21 or 22 nucleotide sequence complementary to SEQ ID NO: 1 and a second passenger strand sequence comprising a contiguous 19 or 20 or 21 or 22 nucleotide sequence that is at least 78% identical to the reverse complement of the second guide strand sequence, and wherein the first and second guide strand sequences are different from each other. The FUT8-inhibiting multi-hairpin amiRNA sequence may optionally comprise a third guide strand sequence comprising a contiguous 19 or 20 or 21 or 22 nucleotide sequence complementary to SEQ ID NO: 1 and a third passenger strand sequence comprising a contiguous 19 or 20 or 21 or 22 nucleotide sequence that is at least 78% identical to the reverse complement of the third guide strand sequence, and wherein the first, second and third guide strand sequences are all different from each other. Each guide strand sequence is separated from its respective passenger strand sequence by between 5 and 35 bases. Exemplary sequences for separating a guide strand sequence from its passenger strand sequence are sequences that comprise a nucleotide sequence selected from SEQ ID NO: 241-250. Exemplary guide strand nucleotide sequences for inhibiting Cricetulus griseus FUT8 and their respective passenger strand nucleotide sequences are SEQ ID NOs: 23 and 108, SEQ ID NOs: 24 and 109, SEQ ID NOs: 25 and 110, SEQ ID NOs: 26 and 111, SEQ ID NOs: 27 and 112, and SEQ ID NOs: 28 and 113.

[0157] An advantageous polynucleotide for inhibition of fucosylation in Cricetulus griseus cells comprises or encodes a GDP-mannose-4, 6-dehydratase (GMD)-inhibiting multi-hairpin amiRNA sequence. A GMD-inhibiting multi-hairpin amiRNA sequence comprises a first guide strand sequence comprising a contiguous 19 or 20 or 21 or 22 nucleotide sequence complementary to SEQ ID NO: 3 and a first passenger strand sequence comprising a contiguous 19 or 20 or 21 or 22 nucleotide sequence that is at least 78% identical to the reverse complement of the first guide strand sequence. The GMD-inhibiting multi-hairpin amiRNA sequence further comprises a second guide strand sequence comprising a contiguous 19 or 20 or 21 or 22 nucleotide sequence complementary to SEQ ID NO: 3 and a second passenger strand sequence comprising a contiguous 19 or 20 or 21 or 22 nucleotide sequence that is at least 78% identical to the reverse complement of the second guide strand sequence, and wherein the first and second guide strand sequences are different from each other. The GMD-inhibiting multi-hairpin amiRNA sequence may optionally comprise a third guide strand sequence comprising a contiguous 19 or 20 or 21 or 22 nucleotide sequence complementary to SEQ ID NO: 3 and a third passenger strand sequence comprising a contiguous 19 or 20 or 21 or 22 nucleotide sequence that is at least 78% identical to the reverse complement of the third guide strand sequence, and wherein the first, second and third guide strand sequences are all different from each other. Each guide strand sequence is separated from its respective passenger strand sequence by between 5 and 35 bases. Exemplary sequences for separating a guide strand sequence from its passenger strand sequence are sequences that comprise a nucleotide sequence selected from SEQ ID NO: 241-250. Exemplary guide strand nucleotide sequences for inhibiting Cricetulus griseus GMD and their respective passenger strand nucleotide sequences are SEQ ID NOs: 35 and 120, SEQ ID NOs: 36 and 121, SEQ ID NOs: 37 and 122, SEQ ID NOs: 38 and 123, SEQ ID NOs: 39 and 124, and SEQ ID NOs: 40 and 125.

[0158] An advantageous polynucleotide for inhibition of fucosylation in Cricetulus griseus cells comprises or encodes a GDP-fucose transporter (GFT)-inhibiting multi-hairpin amiRNA sequence. The GFT-inhibiting multi-hairpin amiRNA nucleotide sequence comprises a first guide strand sequence comprising a contiguous 19 or 20 or 21 or 22 nucleotide sequence complementary to SEQ ID NO: 5 and a first passenger strand sequence comprising a contiguous 19 or 20 or 21 or 22 nucleotide sequence that is at least 78% identical to the reverse complement of the first guide strand sequence. The GFT-inhibiting multi-hairpin amiRNA sequence further comprises a second guide strand sequence comprising a contiguous 19 or 20 or 21 or 22 nucleotide sequence complementary to SEQ ID NO: 5 and a second passenger strand sequence comprising a contiguous 19 or 20 or 21 or 22 nucleotide sequence that is at least 78% identical to the reverse complement of the second guide strand sequence, and wherein the first and second guide strand sequences are different from each other. The GFT-inhibiting multi-hairpin amiRNA sequence may optionally comprise a third guide strand sequence comprising a contiguous 19 or 20 or 21 or 22 nucleotide sequence complementary to SEQ ID NO: 5 and a third passenger strand sequence comprising a contiguous 19 or 20 or 21 or 22 nucleotide sequence that is at least 78% identical to the reverse complement of the third guide strand sequence, and wherein the first, second and third guide strand sequences are all different from each other. Each guide strand sequence is separated from its respective passenger strand sequence by between 5 and 35 bases. Exemplary sequences for separating a guide strand sequence from its passenger strand sequence are sequences that comprise a nucleotide sequence selected from SEQ ID NO: 241-250. Exemplary guide strand nucleotide sequences for inhibiting Cricetulus griseus GFT and their respective passenger strand nucleotide sequences are SEQ ID NOs: 41 and 126, SEQ ID NOs: 42 and 127, SEQ ID NOs: 43 and 128, SEQ ID NOs: 44 and 129, SEQ ID NOs: 45 and 130, and SEQ ID NOs: 46 and 131.

[0159] An advantageous inhibitory polynucleotide for inhibition of fucosylation in Cricetulus griseus cells comprises or encodes a first guide strand sequence comprising a contiguous 19 or 20 or 21 or 22 nucleotide sequence that is perfectly complementary to a natural mammalian cellular mRNA and a first passenger strand sequence comprising a contiguous 19 or 20 or 21 or 22 nucleotide sequence that is at least 78% complementary to the first guide strand sequence, wherein the first guide strand and first passenger strand sequence are separated by between 5 and 35 nucleotides and a second guide strand sequence comprising a contiguous 19 or 20 or 21 or 22 nucleotide sequence that is perfectly complementary to the same natural mammalian cellular mRNA as the first guide strand sequence and a second passenger strand sequence comprising a contiguous 19 or 20 or 21 or 22 nucleotide sequence that is at least 78% complementary to the second guide strand sequence, wherein the second guide strand and second passenger strand sequence are separated by between 5 and 35 nucleotides, and wherein the first and second guide strand sequence are different from each other, and wherein the natural mammalian cellular mRNA comprises a sequence that is at least 98% identical or at least 99% identical to, or perfectly identical to a nucleotide sequence selected from SEQ ID NOs: 1-6. Exemplary multi-hairpin amiRNAs for inhibition of fucosylation in Cricetulus griseus cells include nucleotide sequences SEQ ID NOs: 193-201.

[0160] An advantageous polynucleotide for inhibition of fucosylation in human cells comprises or encodes a FUT8-inhibiting multi-hairpin amiRNA sequence. The FUT8-inhibiting multi-hairpin amiRNA sequence comprises a first guide strand sequence comprising a contiguous 19 or 20 or 21 or 22 nucleotide sequence complementary to SEQ ID NO: 7 and a first passenger strand sequence comprising a contiguous 19 or 20 or 21 or 22 nucleotide sequence that is at least 78% identical to the reverse complement of the first guide strand sequence. The FUT8-inhibiting multi-hairpin amiRNA sequence further comprises a second guide strand sequence comprising a contiguous 19 or 20 or 21 or 22 nucleotide sequence complementary to SEQ ID NO: 7 and a second passenger strand sequence comprising a contiguous 19 or 20 or 21 or 22 nucleotide sequence that is at least 78% identical to the reverse complement of the second guide strand sequence, and wherein the first and second guide strand sequences are different from each other. The FUT8-inhibiting multi-hairpin amiRNA sequence may optionally comprise a third guide strand sequence comprising a contiguous 19 or 20 or 21 or 22 nucleotide sequence complementary to SEQ ID NO: 7 and a third passenger strand sequence comprising a contiguous 19 or 20 or 21 or 22 nucleotide sequence that is at least 78% identical to the reverse complement of the third guide strand sequence, and wherein the first, second and third guide strand sequences are all different from each other. Each guide strand sequence is separated from its respective passenger strand sequence by between 5 and 35 bases. Exemplary sequences for separating a guide strand sequence from its passenger strand sequence are sequences that comprise a nucleotide sequence selected from SEQ ID NO: 241-250. Exemplary guide strand nucleotide sequences for inhibiting human FUT8 and their respective passenger strand nucleotide sequences are SEQ ID NOs: 29 and 114, SEQ ID NOs: 30 and 115, SEQ ID NOs: 31 and 116, SEQ ID NOs: 32 and 117, SEQ ID NOs: 33 and 118, and SEQ ID NOs: 34 and 119.

[0161] An advantageous polynucleotide for inhibition of fucosylation in human cells comprises or encodes a GDP-mannose-4, 6-dehydratase (GMD)-inhibiting multi-hairpin amiRNA sequence. The GMD-inhibiting multi-hairpin amiRNA sequence comprises a first guide strand sequence comprising a contiguous 19 or 20 or 21 or 22 nucleotide sequence complementary to SEQ ID NO: 8 and a first passenger strand sequence comprising a contiguous 19 or 20 or 21 or 22 nucleotide sequence that is at least 78% identical to the reverse complement of the first guide strand sequence. The GMD-inhibiting multi-hairpin amiRNA sequence further comprises a second guide strand sequence comprising a contiguous 19 or 20 or 21 or 22 nucleotide sequence complementary to SEQ ID NO: 8 and a second passenger strand sequence comprising a contiguous 19 or 20 or 21 or 22 nucleotide sequence that is at least 78% identical to the reverse complement of the second guide strand sequence, and wherein the first and second guide strand sequences are different from each other. The GMD-inhibiting multi-hairpin amiRNA sequence may optionally comprise a third guide strand sequence comprising a contiguous 19 or 20 or 21 or 22 nucleotide sequence complementary to SEQ ID NO: 8 and a third passenger strand sequence comprising a contiguous 19 or 20 or 21 or 22 nucleotide sequence that is at least 78% identical to the reverse complement of the third guide strand sequence, and wherein the first, second and third guide strand sequences are all different from each other. Each guide strand sequence is separated from its respective passenger strand sequence by between 5 and 35 bases. Exemplary sequences for separating a guide strand sequence from its passenger strand sequence are sequences that comprise a nucleotide sequence selected from SEQ ID NO: 241-250. Exemplary guide strand nucleotide sequences for inhibiting human GMD and their respective passenger strand nucleotide sequences are SEQ ID NOs: 47 and 132, SEQ ID NOs: 48 and 133, and SEQ ID NOs: 49 and 134.

[0162] An advantageous polynucleotide for inhibition of fucosylation in human cells comprises or encodes a GDP-fucose transporter (GFT)-inhibiting multi-hairpin amiRNA sequence. The GFT-inhibiting multi-hairpin amiRNA sequence comprises a first guide strand sequence comprising a contiguous 19 or 20 or 21 or 22 nucleotide sequence complementary to SEQ ID NO: 9 and a first passenger strand sequence comprising a contiguous 19 or 20 or 21 or 22 nucleotide sequence that is at least 78% identical to the reverse complement of the first guide strand sequence. The GFT-inhibiting multi-hairpin amiRNA sequence further comprises a second guide strand sequence comprising a contiguous 19 or 20 or 21 or 22 nucleotide sequence complementary to SEQ ID NO: 9 and a second passenger strand sequence comprising a contiguous 19 or 20 or 21 or 22 nucleotide sequence that is at least 78% identical to the reverse complement of the second guide strand sequence, and wherein the first and second guide strand sequences are different from each other. The GFT-inhibiting multi-hairpin amiRNA sequence may optionally comprise a third guide strand sequence comprising a contiguous 19 or 20 or 21 or 22 nucleotide sequence complementary to SEQ ID NO: 9 and a third passenger strand sequence comprising a contiguous 19 or 20 or 21 or 22 nucleotide sequence that is at least 78% identical to the reverse complement of the third guide strand sequence, and wherein the first, second and third guide strand sequences are all different from each other. Each guide strand sequence is separated from its respective passenger strand sequence by between 5 and 35 bases. Exemplary sequences for separating a guide strand sequence from its passenger strand sequence are sequences that comprise a nucleotide sequence selected from SEQ ID NO: 241-250. Exemplary guide strand nucleotide sequences for inhibiting human GFT and their respective passenger strand nucleotide sequences are SEQ ID NOs: 50 and 135, SEQ ID NOs: 51 and 136, and SEQ ID NOs: 52 and 137.

[0163] An advantageous inhibitory polynucleotide for inhibition of fucosylation in human cells comprises or encodes a first guide strand sequence comprising a contiguous 19 or 20 or 21 or 22 nucleotide sequence that is perfectly complementary to a natural mammalian cellular mRNA and a first passenger strand sequence comprising a contiguous 19 or 20 or 21 or 22 nucleotide sequence that is at least 78% complementary to the first guide strand sequence, wherein the first guide strand and first passenger strand sequence are separated by between 5 and 35 nucleotides and a second guide strand sequence comprising a contiguous 19 or 20 or 21 or 22 nucleotide sequence that is perfectly complementary to the same natural mammalian cellular mRNA as the first guide strand sequence and a second passenger strand sequence comprising a contiguous 19 or 20 or 21 or 22 nucleotide sequence that is at least 78% complementary to the second guide strand sequence, wherein the second guide strand and second passenger strand sequence are separated by between 5 and 35 nucleotides, and wherein the first and second guide strand sequence are different from each other, and wherein the natural mammalian cellular mRNA comprises a sequence that is at least 98% identical or at least 99% identical to, or perfectly identical to a nucleotide sequence selected from SEQ ID NOs: 7-9. Exemplary multi-hairpin amiRNAs for inhibition of fucosylation in human cells include SEQ ID NOs: 202-204.

[0164] A method for producing secreted proteins with reduced fucose levels from mammalian cells comprises (i) introducing into a mammalian cell an inhibitory polynucleotide for inhibition of fucosylation in mammalian cells, wherein the inhibitory polynucleotide comprises or encodes a multi-hairpin amiRNA for expression of two or more interfering RNA guide sequences complementary to the same natural mammalian mRNA, and wherein the natural mammalian mRNA encodes an enzyme involved in the fucosylation of proteins (for example GDP-Mannose 4,6-dehydratase (GMD), alpha-(1,6)-fucosyl transferase (FUT8) and GDP-fucose transporter 1 (GFT)), and (ii) introducing into the same mammalian cell a gene encoding a protein to be secreted, the gene expressible in the mammalian cell. The two sequences may be introduced in any order: for example, the inhibitory polynucleotide may be introduced first and the gene encoding a protein to be secreted may be introduced second, the gene encoding a protein to be secreted may be introduced first and the inhibitory polynucleotide may be introduced second, or the two sequences may be introduced to the mammalian cell at the same time. In some instances, the protein to be secreted is an antibody or an Fc fusion.

### 5.4 Glutamine Synthetase

[0165] Disruption of a natural mammalian gene that normally provides to the cell a protein that is essential for growth, division or survival, such as a gene that encodes an essential metabolic enzyme, can provide an opportunity to develop a metabolic selection system. Some exemplary metabolic selection systems are described in Section 5.2.6. Typically, this is accomplished by permanent irreversible disruption of the gene encoding the essential metabolic enzyme, which can be accomplished using a targeted disruption method such as zinc finger nucleases, TALE effector nucleases, CRISPR Cas9-directed nucleases and AAV-directed nucleases, or a random method such as irradiation or other random mutagenesis of the cells with subsequent identification of cells in which the gene encoding the essential metabolic enzyme is disrupted. Cells in which expression of the essential metabolic gene has been disrupted can survive, grow and divide in the absence of this otherwise essential gene if an enzyme, growth factor, nutrient or other molecule is provided exogenously to compensate for the lack of the product of the missing essential metabolic enzyme. Cells in which expression of the essential metabolic gene has been disrupted can then be used as hosts for subsequent introduction of expression polynucleotides which comprise a selectable marker whose function is to complement or compensate for the lack of function of the essential metabolic gene, and one or more other gene to be expressed in the cell. These cells are then subjected to conditions where the enzyme, growth factor, nutrient or other molecule that was provided to allow the cell to grow, are removed. Only cells that have taken up the expression polynucleotide comprising the gene encoding the complementing selectable marker will survive. Previously described examples include CRISPR disruption of the glutamine synthetase gene in human culture cells (Yu et al, 2018. Biotechnol Bioeng. 115: 1367-1372. “Glutamine synthetase gene knockout-human embryonic kidney 293E cells for stable production of monoclonal antibodies.”), zinc finger disruption of glutamine synthetase in CHO cells (Fan et al 2012. Biotechnol Bioeng. 109: 1007-15. “Improving the efficiency of CHO cell line generation using glutamine synthetase gene knockout cells.”), zinc finger disruption of the DHFR gene in mammalian cells (Santiago et al 2008. Proc Natl Acad Sci USA. 105: 5809-5814. “Targeted gene knockout in mammalian cells by using engineered zinc-finger nucleases”), and deletion of DHFR in CHO cells by irradiation (Urlaub et al, 1983. Cell. 33: 405-12. “Deletion of the diploid dihydrofolate reductase locus from cultured mammalian cells.”).

[0166] Permanent disruption of the gene sequence has been the method previously used to inhibit expression of essential metabolic enzymes because, in order to provide an appropriate selective pressure, expression of the essential metabolic enzyme must be reduced to below a level that would allow cells to grow. There must also be no “leakiness”: if some cells are able to resume expressing the essential metabolic enzyme, then they will grow in the absence of the expression polynucleotide comprising the complementing selectable marker, which will create a background of cells not expressing the genes to be expressed that are encoded on the expression polynucleotide. RNA interference has not generally been sufficiently effective at inhibiting the expression of essential metabolic genes, nor sufficiently stable as to ensure the continued inhibition of expression of the essential metabolic gene. However, the benefit of an RNA interference approach is that it can be extremely fast to implement, and it can inhibit all copies of a gene in a diploid or polyploid cell simultaneously, without having to independently determine that each genomic copy has been mutationally inactivated. Furthermore, as shown in Examples in Section 6.2, a method comprising introduction of a multi-hairpin amiRNA gene for inhibition of an essential metabolic gene into the genome of a pool of cells, and selection of cells whose genomes comprise the multi-hairpin amiRNA gene, can result in a pool of cells in which expression of the essential metabolic enzyme is inhibited to a level that prevents growth of the cell in more than 70% or 80% or 90% or 91% or 92% or 93% or 94% or 95% or 96% or 97% or 98% or 99% of the cells in the pool. This is in contrast with directed cleavage methods such as zinc finger nucleases, TAL effector nucleases (TALENs), CRISPR/Cas9 nucleases or AAV. Such methods are considered effective if they can mutate and inactivate a target gene in between 1% and 10% of the cells into which they are transfected. The multi-hairpin amiRNA approach is thus at least 10-fold more efficient than these nuclease-based gene disruption techniques.

[0167] A multi-hairpin amiRNA gene can be integrated into the genome of a mammalian cell to inhibit a natural mammalian gene that normally provides to the cell a protein that is essential for growth (including survival and division). The multi-hairpin amiRNA may be placed into the 3′UTR of a second gene to be expressed within the cell. Preferably the gene encodes an essential metabolic enzyme, such that the cell cannot grow in the absence of this otherwise essential gene unless an enzyme, growth factor, nutrient or other molecule is provided exogenously (we refer to this as an exogenously provided complementing factor). Cells will often have intracellular reserves of various nutrients, so a cell is considered not to grow if the cell can divide only 1, 2, 3 or 4 times after the removal of the exogenously provided complementing factor. A population of cells in which expression of the essential metabolic enzyme has been successfully inhibited will thus increase its viable cell density by no more than 2-fold, 4-fold, 8-fold or 16-fold following removal of the exogenously provided complementing factor. Preferably expression of the essential metabolic enzyme is inhibited such that less than 50% or 40% or 30% or 20% or 10% or 5% or 2% or 1% of the natural enzyme activity remains in the cell. Examples of such proteins include an essential metabolic enzyme involved in the synthesis of an amino acid, an essential metabolic enzyme involved in the synthesis of an amino acid precursor, an essential metabolic enzyme involved in the synthesis of a nucleotide, an essential metabolic enzyme involved in the synthesis of a nucleotide precursor, an essential metabolic enzyme involved in the synthesis of a fatty acid and an essential metabolic enzyme involved in the synthesis of a vitamin. If the multi-hairpin amiRNA gene is stably integrated into the mammalian cell genome, and stably expressed, the essential metabolic enzyme is stably inhibited. A second gene that complements or compensates for the inhibited essential metabolic enzyme may then be used as a selectable marker in the mammalian cell. The second gene may encode an alternative version of the inhibited essential metabolic enzyme that is resistant to inhibition by the multi-hairpin amiRNA, for example by containing differences in its mRNA sequence at the positions of complementarity between the mRNA for the essential metabolic enzyme and the guide strand sequences encoded by the multi-hairpin amiRNA gene. The second gene may alternatively encode one or more enzymes that provide an alternative metabolic pathway to provide the missing essential nutrient. A second polynucleotide comprising the second complementing gene may then be introduced into the mammalian cell, and selection pressure can be applied by withdrawal, at once or by tapered reduction of the exogenously provided enzyme, growth factor, nutrient or other molecule. The only cells that survive such selection are those that have taken up the second polynucleotide and expressed the second gene. The second polynucleotide may comprise other genes that will also be expressed. Preferably the second polynucleotide is a transposon or a viral vector. One advantage of this strategy is that nutrient withdrawal is often a very gentle selection compared with the addition of a drug. Drugs that are commonly used as selectable markers often have pleiotropic effects which may have undesired effects on the mammalian cell. For example, the use of methionine sulfoxamine to inhibit the glutamine synthetase gene reduces the cellular growth rate and increases production of toxic metabolic wastes lactate and ammonia in CHO cells (Noh et al (2018). Comprehensive characterization of glutamine synthetase-mediated selection for the establishment of recombinant CHO cells producing monoclonal antibodies. Scientific Reports, 8, [5361]. https://doi.org/10.1038/s41598-018-23720-9)

[0168] A method for stably introducing into a mammalian cell a polynucleotide for expression comprises (a) introducing into the mammalian cell an inhibitory polynucleotide comprising a gene, expressible in the mammalian cell, which encodes an interfering RNA with guide strand sequence(s) complementary to the mRNA for an essential metabolic enzyme; (b) growing the cell in the presence of an enzyme, growth factor, nutrient or other molecule that is provided exogenously to enable the cell to survive, grow and divide while expression of the essential metabolic enzyme is inhibited; (c) introducing into the cell a second polynucleotide comprising (i) a gene encoding a selectable marker expressible in the mammalian cell, wherein the selectable marker functionally complements the lack of the essential metabolic enzyme and removes the requirement for the exogenous provision of the enzyme, growth factor, nutrient or other molecule that enabled the cell to survive, grow and divide while expression of the essential metabolic enzyme was inhibited, and (ii) a second gene expressible in the mammalian cell; and (d) growing the cell in the absence of the enzyme, growth factor, nutrient or other molecule that was provided exogenously in (b) to enable the cell to survive, grow and divide while expression of the essential metabolic enzyme is inhibited, thereby making the cell's survival, growth and division dependent upon the expression of the selectable marker from the second polynucleotide. Preferably the first and second polynucleotides are integrated into the mammalian cell genome. The method optionally also comprises (e) growing the cell under conditions where the second gene in the second polynucleotide is expressed. Optionally the second gene encodes a protein product, and the method further comprises (f) collecting or purifying the protein product encoded by the second gene.

[0169] One class of selectable markers that may be advantageously incorporated into a polynucleotide are those that provide a growth advantage to the cell by allowing the cell to synthesize a metabolically useful substance. One example of such a selectable marker is glutamine synthetase (GS, for example a polypeptide sequence selected from SEQ ID NOs: 304-308) which allows selection via glutamine metabolism. Glutamine synthase is the enzyme responsible for the biosynthesis of glutamine from glutamate and ammonia, it is a crucial component of the only pathway for glutamine formation in a mammalian cell. In the absence of glutamine in the growth medium, the glutamine synthetase enzyme is essential for the survival of mammalian cells in culture. Some cell lines, for example mouse myeloma cells do not express enough glutamine synthetase enzyme to survive without added glutamine.

[0170] In some cell lines, for example HEK cells and Chinese hamster ovary (CHO) cells, there is enough glutamine synthetase enzyme expressed to enable the cell to survive without exogenously added glutamine. These cells can be manipulated by genome editing techniques including CRISPR/Cas9 to reduce or eliminate the activity of the endogenous glutamine synthetase enzyme. However even with CRISPR this is a laborious process that may introduce off-target mutations in other genes. An alternative method is to stably integrate into the cell genome a polynucleotide comprising a multi-hairpin amiRNA that targets the endogenous glutamine synthetase gene. An exogenously provided glutamine synthetase gene may then be used as a selectable marker, provided the exogenously provided gene does not comprise the sequences targeted by the guide strand sequence. This may be accomplished by altering the codon used to encode the glutamine synthetase if the guide targets sequences within the open reading frame. It may be accomplished by altering the 5′ UTR if the guide targets sequences within the 5′ UTR. It may be accomplished by altering the polyadenylation signal of the 3′ UTR if the guide targets sequences within the polyadenylation signal sequence/3′ UTR.

### 5.4.1 Micro RNA to Reduce Endogenous Glutamine Synthetase

[0171] An advantageous polynucleotide for inhibition of glutamine synthetase in Cricetulus griseus cells through RNA interference comprises or encodes a glutamine synthetase-inhibiting multi-hairpin amiRNA sequence. The glutamine synthetase-inhibiting multi-hairpin amiRNA sequence comprises a first guide strand sequence comprising a contiguous 19 or 20 or 21 or 22 nucleotide sequence complementary to SEQ ID NO: 10 and a first passenger strand sequence comprising a contiguous 19 or 20 or 21 or 22 nucleotide sequence that is at least 78% identical to the reverse complement of the first guide strand sequence. The glutamine synthetase-inhibiting multi-hairpin amiRNA sequence further comprises a second guide strand sequence comprising a contiguous 19 or 20 or 21 or 22 nucleotide sequence complementary to SEQ ID NO: 10 and a second passenger strand sequence comprising a contiguous 19 or 20 or 21 or 22 nucleotide sequence that is at least 78% identical to the reverse complement of the second guide strand sequence, and wherein the first and second guide strand sequences are different from each other. The glutamine synthetase-inhibiting multi-hairpin amiRNA sequence may optionally comprise a third guide strand sequence comprising a contiguous 19 or 20 or 21 or 22 nucleotide sequence complementary to SEQ ID NO: 10 and a third passenger strand sequence comprising a contiguous 19 or 20 or 21 or 22 nucleotide sequence that is at least 78% identical to the reverse complement of the third guide strand sequence, and wherein the first, second and third guide strand sequences are all different from each other. Each guide strand sequence is separated from its respective passenger strand sequence by between 5 and 35 bases. Exemplary sequences for separating a guide strand sequence from its passenger strand sequence are sequences that comprise a nucleotide sequence selected from SEQ ID NO: 241-250. Exemplary guide strand nucleotide sequences for inhibiting Cricetulus griseus glutamine synthetase and their respective passenger strand nucleotide sequences are SEQ ID NOs: 53 and 138, SEQ ID NOs: 54 and 139, SEQ ID NOs: 55 and 140, SEQ ID NOs: 56 and 141, SEQ ID NOs: 57 and 142, SEQ ID NOs: 58 and 143, SEQ ID NOs: 59 and 144, SEQ ID NOs: 60 and 145, SEQ ID NOs: 61 and 146, SEQ ID NOs: 62 and 147, SEQ ID NOs: 63 and 148, SEQ ID NOs: 64 and 149, SEQ ID NOs: 65 and 150, SEQ ID NOs: 66 and 151, SEQ ID NOs: 67 and 152 and SEQ ID NOs: 68 and 153.

[0172] Multi-hairpin amiRNA with nucleotide sequence SEQ ID NO: 209 comprises guide strand sequences complementary to three different sequences within the CHO glutamine synthetase mRNA target (nucleotide sequence SEQ ID NO: 10). Multi-hairpin amiRNA nucleotide sequence SEQ ID NO: 209 comprises a first guide strand sequence with nucleotide sequence SEQ ID NO: 53 and a first passenger strand sequence with nucleotide sequence SEQ ID NO: 138; nucleotide sequence SEQ ID NO: 209 further comprises a second guide strand sequence with nucleotide sequence SEQ ID NO: 54 and a second passenger strand sequence with nucleotide sequence SEQ ID NO: 139; nucleotide sequence SEQ ID NO: 209 further comprises a third guide strand sequence with nucleotide sequence SEQ ID NO: 55 and a third passenger strand sequence with nucleotide sequence SEQ ID NO: 140. Guide strand nucleotide sequences SEQ ID NO: 53, SEQ ID NO: 54, and SEQ ID NO: 55 are all different from each other. Each guide strand sequence is separated from its respective passenger strand sequence by a nucleotide sequence comprising SEQ ID NO: 241.

[0173] Incorporation of the multi-hairpin amiRNA into a transposon vector enhances the likelihood that the amiRNA genes will be integrated into transcriptionally active regions of the genome. As described in Section 6.2, integration of the multi-hairpin amiRNA with nucleotide sequence SEQ ID NO: 209, operably linked to a promoter active in a mammalian cell, into the genome of a Cricetulus griseus cell reduces expression of glutamine synthetase such that the cell becomes completely dependent upon exogenously supplied glutamine for its survival.

[0174] A similar strategy can be used to create glutamine synthetase-deficient human cell lines, such as HEK cell lines. An advantageous polynucleotide for inhibition of glutamine synthetase in human cells through RNA interference comprises or encodes a glutamine synthetase-inhibiting multi-hairpin amiRNA sequence. The glutamine synthetase-inhibiting multi-hairpin amiRNA sequence comprises a first guide strand sequence comprising a contiguous 19 or 20 or 21 or 22 nucleotide sequence complementary to the mRNA for human glutamine synthetase (e.g. nucleotide sequence SEQ ID NO: 12) and a first passenger strand sequence comprising a contiguous 19 or 20 or 21 or 22 nucleotide sequence that is at least 78% identical to the reverse complement of the first guide strand sequence. The glutamine synthetase-inhibiting multi-hairpin amiRNA sequence further comprises a second guide strand sequence comprising a contiguous 19 or 20 or 21 or 22 nucleotide sequence complementary to the mRNA for human glutamine synthetase (e.g. nucleotide sequence SEQ ID NO: 12) and a second passenger strand sequence comprising a contiguous 19 or 20 or 21 or 22 nucleotide sequence that is at least 78% identical to the reverse complement of the second guide strand sequence, and wherein the first and second guide strand sequences are different from each other. The glutamine synthetase-inhibiting multi-hairpin amiRNA sequence may optionally comprise a third guide strand sequence comprising a contiguous 19 or 20 or 21 or 22 nucleotide sequence complementary to the mRNA for human glutamine synthetase (e.g. nucleotide sequence SEQ ID NO: 12) and a third passenger strand sequence comprising a contiguous 19 or 20 or 21 or 22 nucleotide sequence that is at least 78% identical to the reverse complement of the third guide strand sequence, and wherein the first, second and third guide strand sequences are all different from each other. Each guide strand sequence is separated from its respective passenger strand sequence by between 5 and 35 bases. Exemplary sequences for separating a guide strand sequence from its passenger strand sequence are sequences that comprise a nucleotide sequence selected from SEQ ID NO: 241-250. Exemplary guide strand nucleotide sequences for inhibiting human glutamine synthetase and their respective passenger strand nucleotide sequences are SEQ ID NOs: 69 and 154, SEQ ID NOs: 70 and 155, SEQ ID NOs: 71 and 156, SEQ ID NOs: 72 and 157, SEQ ID NOs: 73 and 158, SEQ ID NOs: 74 and 159, SEQ ID NOs: 75 and 160, SEQ ID NOs: 76 and 161, SEQ ID NOs: 77 and 162, SEQ ID NOs: 78 and 163, SEQ ID NOs: 79 and 164, SEQ ID NOs: 80 and 165, SEQ ID NOs: 81 and 166, SEQ ID NOs: 628 and 631, SEQ ID NOs: 629 and 632, SEQ ID NOs: 630 and 633.

[0175] Multi-hairpin amiRNA with nucleotide sequence SEQ ID NO: 634 comprises guide strand sequences complementary to four different sequences within the human glutamine synthetase mRNA target (nucleotide sequence SEQ ID NO: 11). Multi-hairpin amiRNA nucleotide sequence SEQ ID NO: 634 comprises a first guide strand sequence with nucleotide sequence SEQ ID NO: 628 and a first passenger strand sequence with nucleotide sequence SEQ ID NO: 631; nucleotide sequence SEQ ID NO: 634 further comprises a second guide strand sequence with nucleotide sequence SEQ ID NO: 69 and a second passenger strand sequence with nucleotide sequence SEQ ID NO: 154; nucleotide sequence SEQ ID NO: 634 further comprises a third guide strand sequence with nucleotide sequence SEQ ID NO: 629 and a third passenger strand sequence with nucleotide sequence SEQ ID NO: 632; nucleotide sequence SEQ ID NO: 634 further comprises a fourth guide strand sequence with nucleotide sequence SEQ ID NO: 630 and a third passenger strand sequence with nucleotide sequence SEQ ID NO: 633. Guide strand nucleotide sequences SEQ ID NO: 69, SEQ ID NO: 628, SEQ ID NO: 629 and SEQ ID NO: 630 are all different from each other. Each guide strand sequence is separated from its respective passenger strand sequence by a nucleotide sequence comprising SEQ ID NO: 241. Incorporation of the multi-hairpin amiRNA into a transposon vector enhances the likelihood that the amiRNA genes will be integrated into transcriptionally active regions of the genome.

[0176] In one embodiment, a multi-hairpin amiRNA gene to express amiRNAs that inhibit glutamine synthetase are introduced into a cell lacking a functional dihydrofolate reductase gene. The resulting cell requires media supplemented with glutamine, hypoxanthine and thymidine (HT) in order to grow.

### 5.4.2 Complementation of Glutamine Synthetase Auxotrophy

[0177] In cells lacking a functional glutamine synthetase gene, including cells in which endogenous glutamine synthetase expression is reduced by RNA interference (for example by integration of multi-hairpin amiRNA gene comprising nucleotide sequence SEQ ID NO: 209 operably linked to a promoter active in a mammalian cell, into the genome of the cell) an exogenously added glutamine synthetase gene can function as a selectable marker by permitting growth in a glutamine-free medium (i.e., rescuing the cell from glutamine auxotrophy). Preferably a polynucleotide comprising the exogenous glutamine synthetase gene is introduced into the cell. Preferably the exogenous glutamine synthetase gene comprises sequence features that prevent its expression from being inhibited by any RNA interference that has been used to make the host cell auxotrophic for glutamine. If RNA interference molecules, including amiRNA guide strands, are complementary to the coding portion of the endogenous glutamine synthetase, an exogenous gene encoding glutamine synthetase can avoid inhibition if the coding sequence is changed, for example by silent mutations in the targeted region. If RNA interference molecules, including amiRNA guide strands, are complementary to the 3′ UTR or 5′ UTR portions of the endogenous glutamine synthetase, an exogenous gene encoding glutamine synthetase can avoid inhibition by replacing the natural UTR sequences with alternative sequences, for example synthetic sequences or UTR sequences taken or adapted from other natural genes.

[0178] Selection protocols include introducing a polynucleotide comprising sequences encoding a glutamine synthase selectable marker, and then growing the cell in media that does not contain enough glutamine for the cells to survive in the absence of an exogenous gene encoding glutamine synthetase.

[0179] Preferably the exogenous gene encoding glutamine synthetase gene is operably linked to a weak promoter or other sequence elements that attenuate expression, such that high levels of expression can only occur if many copies of the polynucleotide are present, or if they are integrated in a position in the genome where high levels of expression occur. In such cases it may be unnecessary to use a glutamine synthetase inhibitor such as methionine sulphoximine: simply synthesizing enough glutamine for cell survival may provide a sufficiently stringent selection if expression of the glutamine synthetase is attenuated. Exemplary glutamine synthetase polypeptide sequences are given as SEQ ID NOs: 304-308.

### 5.5 Synthetic Amirna Target Sequences

[0180] As described in Sections 5.3 and 6.1, multi-hairpin amiRNA sequences are described that effectively inhibit expression of Cricetulus griseus alpha-(1,6)-fucosyl transferase (FUT8). DNA encoding the amiRNA sequences, for example nucleotide sequences SEQ ID NOs: 193-195, can be operably linked to a promoter active in a mammalian cell. The guide RNAs in these multihairpin amiRNAs are complementary to the 3′ UTR of the FUT8 mRNA (with nucleotide sequence SEQ ID NO: 2). Expression of a polypeptide from a polynucleotide that comprises a promoter operably linked to an open reading frame encoding the polypeptide and a polyadenylation signal sequence is inhibitable by these multi-hairpin amiRNAs if the polynucleotide further comprises nucleotide sequence SEQ ID NO: 2, such that SEQ ID NO:2 is transcribed and incorporated into the primary transcript. Preferably SEQ ID NO: 2 is located to the 3′ of the open reading frame encoding the polypeptide, and to the 5′ of the polyadenylation signal sequence. Preferably the open reading frame is operably linked to a promoter active in a eukaryotic cell, more preferably the promoter is active in a mammalian cell. Preferably the open reading frame does not encode Cricetulus griseus alpha-(1,6)-fucosyl transferase or Cricetulus griseus glutamine synthetase. The polynucleotide comprising nucleotide sequence SEQ ID NO: 2 and the polynucleotide encoding multi-hairpin amiRNA comprising a nucleotide sequence selected from SEQ ID NOs: 193-195 may be introduced into the same eukaryotic cell. Preferably the polynucleotide encoding the multi-hairpin amiRNA is operably linked to a promoter that is active in the cell; the promoter may be inducible or constitutive. The eukaryotic cell is preferably a mammalian cell, more preferably a human cell or a rodent cell. The cell is an aspect of the invention.

[0181] Multi-hairpin amiRNA with nucleotide sequence SEQ ID NO: 193 comprises guide strand sequences complementary to a region of the 3′ UTR of Cricetulus griseus FUT8 with sequence SEQ ID NO: 560. Expression of a polypeptide from a polynucleotide that comprises a promoter operably linked to an open reading frame encoding the polypeptide and a polyadenylation signal sequence is inhibitable by a multi-hairpin amiRNA comprising sequence SEQ ID NO: 193, if the polynucleotide further comprises nucleotide sequence SEQ ID NO: 560, such that SEQ ID NO: 560 is transcribed and incorporated into the primary transcript. Preferably SEQ ID NO: 560 is located to the 3′ of the open reading frame encoding the polypeptide, and to the 5′ of the polyadenylation signal sequence. Preferably the open reading frame is operably linked to a promoter active in a eukaryotic cell, more preferably the promoter is active in a mammalian cell. Preferably the open reading frame does not encode Cricetulus griseus alpha-(1,6)-fucosyl transferase or Cricetulus griseus glutamine synthetase. The polynucleotide comprising nucleotide sequence SEQ ID NO: 560 and a polynucleotide encoding the multi-hairpin amiRNA comprising nucleotide sequence SEQ ID NO: 193 or the amiRNA may be introduced into the same eukaryotic cell. Preferably a polynucleotide encoding the multi-hairpin amiRNA is operably linked to a promoter that is active in the cell; the promoter may be inducible or constitutive. The eukaryotic cell is preferably a mammalian cell, a human cell or a rodent cell. The cell is an aspect of the invention.

[0182] Multi-hairpin amiRNA with nucleotide sequence SEQ ID NO: 194 comprises guide strand sequences complementary to a region of the 3′ UTR of Cricetulus griseus FUT8 with sequence SEQ ID NO: 560. Expression of a polypeptide from a polynucleotide that comprises a promoter operably linked to an open reading frame encoding the polypeptide and a polyadenylation signal sequence is inhibitable by a multi-hairpin amiRNA comprising SEQ ID NO: 194 if the polynucleotide further comprises nucleotide sequence SEQ ID NO: 560, such that SEQ ID NO: 560 is transcribed and incorporated into the primary transcript. Preferably SEQ ID NO: 560 is located to the 3′ of the open reading frame encoding the polypeptide, and to the 5′ of the polyadenylation signal sequence. Preferably the open reading frame is operably linked to a promoter active in a eukaryotic cell, more preferably the promoter is active in a mammalian cell. Preferably the open reading frame does not encode Cricetulus griseus alpha-(1,6)-fucosyl transferase or Cricetulus griseus glutamine synthetase. The polynucleotide comprising nucleotide sequence SEQ ID NO: 560 and a polynucleotide encoding the multi-hairpin amiRNA comprising nucleotide sequence SEQ ID NO: 194 or the amiRNA may be introduced into the same eukaryotic cell. Preferably a polynucleotide encoding the multi-hairpin amiRNA is operably linked to a promoter that is active in the cell; the promoter may be inducible or constitutive. The eukaryotic cell is preferably a mammalian cell, a human cell or a rodent cell. The cell is an aspect of the invention.

[0183] Multi-hairpin amiRNA with nucleotide sequence SEQ ID NO: 195 comprises guide strand sequences complementary to a region of the 3′ UTR of Cricetulus griseus FUT8 with sequence SEQ ID NO: 561. Expression of a polypeptide from a polynucleotide that comprises a promoter operably linked to an open reading frame encoding the polypeptide and a polyadenylation signal sequence is inhibitable by a multi-hairpin amiRNA comprising SEQ ID NO: 195 if the polynucleotide further comprises nucleotide sequence SEQ ID NO: 561, such that SEQ ID NO: 561 is transcribed and incorporated into the primary transcript. Preferably SEQ ID NO: 561 is located to the 3′ of the open reading frame encoding the polypeptide, and to the 5′ of the polyadenylation signal sequence. Preferably the open reading frame is operably linked to a promoter active in a eukaryotic cell, more preferably the promoter is active in a mammalian cell. Preferably the open reading frame does not encode Cricetulus griseus alpha-(1,6)-fucosyl transferase or Cricetulus griseus glutamine synthetase. The polynucleotide comprising nucleotide sequence SEQ ID NO: 561 and a polynucleotide encoding the multi-hairpin amiRNA comprising nucleotide sequence SEQ ID NO: 195 or the amiRNA may be introduced into the same eukaryotic cell. Preferably a polynucleotide encoding the multi-hairpin amiRNA is operably linked to a promoter that is active in the cell; the promoter may be inducible or constitutive. The eukaryotic cell is preferably a mammalian cell, a human cell or a rodent cell. The cell is an aspect of the invention.

[0184] As described in Sections 5.4 and 6.2, multi-hairpin amiRNA sequences are described that effectively inhibit expression of Cricetulus griseus glutamine synthetase, for example nucleotide sequence SEQ ID NO: 209. The guide RNAs in this multihairpin amiRNA are complementary to the 3′ UTR of the mRNA (with nucleotide sequence SEQ ID NO: 558). Expression of a polypeptide from a polynucleotide that comprises a promoter operably linked to an open reading frame encoding the polypeptide and a polyadenylation signal sequence is inhibitable by these multi-hairpin amiRNAs if the polynucleotide further comprises nucleotide sequence SEQ ID NO: 558, such that SEQ ID NO: 558 is transcribed and incorporated into the primary transcript. Preferably SEQ ID NO: 558 is located to the 3′ of the open reading frame encoding the polypeptide, and to the 5′ of the polyadenylation signal sequence. Preferably the open reading frame is operably linked to a promoter active in a eukaryotic cell, more preferably the promoter is active in a mammalian cell. Preferably the open reading frame does not encode Cricetulus griseus alpha-(1,6)-fucosyl transferase or Cricetulus griseus glutamine synthetase. The polynucleotide comprising nucleotide sequence SEQ ID NO: 558 and a polynucleotide encoding the multi-hairpin amiRNA comprising nucleotide sequence SEQ ID NO: 209 or the amiRNA may be introduced into the same eukaryotic cell. Preferably the multi-hairpin amiRNA is operably linked to a promoter that is active in the cell; the promoter may be inducible or constitutive. The eukaryotic cell is preferably a mammalian cell, a human cell or a rodent cell. The cell is an aspect of the invention.

[0185] Multi-hairpin amiRNA with nucleotide sequence SEQ ID NO: 209 comprises guide strand sequences complementary to a region of the 3′ UTR of Cricetulus griseus glutamine synthetase with sequence SEQ ID NO: 559. Expression of a polypeptide from a polynucleotide that comprises a promoter operably linked to an open reading frame encoding the polypeptide and a polyadenylation signal sequence is inhibitable by a multi-hairpin amiRNA comprising SEQ ID NO: 209 if the polynucleotide further comprises nucleotide sequence SEQ ID NO: 559, such that SEQ ID NO: 559 is transcribed and incorporated into the primary transcript. Preferably SEQ ID NO: 559 is located to the 3′ of the open reading frame encoding the polypeptide, and to the 5′ of the polyadenylation signal sequence. Preferably the open reading frame is operably linked to a promoter active in a eukaryotic cell, more preferably the promoter is active in a mammalian cell. Preferably the open reading frame does not encode Cricetulus griseus alpha-(1,6)-fucosyl transferase or Cricetulus griseus glutamine synthetase. The polynucleotide comprising nucleotide sequence SEQ ID NO: 559 and a polynucleotide encoding the multi-hairpin amiRNA comprising nucleotide sequence SEQ ID NO: 209 or the amiRNA may be introduced into the same eukaryotic cell. Preferably a polynucleotide encoding the multi-hairpin amiRNA is operably linked to a promoter that is active in the cell; the promoter may be inducible or constitutive. The eukaryotic cell is preferably a mammalian cell, a human cell or a rodent cell. The cell is an aspect of the invention.

[0186] Use of an inducible promoter from which to express the multi-hairpin amiRNA allows the controlled suppression of expression of the open reading frame to which the polynucleotide comprising the amiRNA target is linked. If a cell comprises a constitutive promoter operably linked to the multi-hairpin amiRNA, the cell will constitutively reduce expression of an open reading frame to which the polynucleotide comprising the amiRNA target is linked. This is useful when the open reading frame encodes a toxic protein and when the cell needs to be able to tolerate the open reading frame, for example if the open reading frame encodes a toxic protein produced by an oncolytic virus, and the cell is to be used to package the virus.

### 5.6 Micro RNA for Inhibiting Sialidases

[0187] Sialic acid plays an important role in regulating the serum half-life, stability, and solubility of the therapeutic glycoproteins by preventing the degradation of the terminal glycan structure. Sialic acid is removed from proteins produced by Chinese hamster ovary (CHO) cells by sialidases that are present in the plasma membrane of live cells (Neu3), and those that are released by lysed dead cells (Neu1 and Neu2). The sialic acid content of proteins secreted by CHO cells can be increased by inhibiting expression of endogenous sialidases. Sialylation of CHO-produced proteins has been improved by inhibiting the expression of Neu2 (Ngantung et. al., 2006. Biotechnol. Bioeng. 95, 106-119. “RNA interference of sialidase improves glycoprotein sialic acid content consistency.”) or Neu1, Neu2 or Neu3 (Zhang et. al., 2010. Biotechnol. Bioeng. 105, 1094-1105. “Enhancing glycoprotein sialylation by targeted gene silencing in mammalian cells.”) using RNA interference. In all cases, each siRNA or shRNA was tested independently to identify the most effective, but multiple sequences within the same sialidase mRNA were not targeted. Although an in vitro sialidase test suggested that Zhang et. al. had reduced detectable enzyme activity by −98%, the mRNA was only reduced to 30% of the original levels, and effects on sialic acid content of an interferon molecule produced by the cell were modest. An alternative approach used CRISPR to knock out the sialidase genes (Ha et. al., 2020. Metabolic Engineering 57, 182-192. “Knockout of sialidase and pro-apoptotic genes in Chinese hamster ovary cells enables the production of recombinant human erythropoietin in fedbatch cultures”). The benefit of an RNA interference approach is that it facilitates modification of cell lines that have already been developed to express a protein product: artificial micro RNAs can be easily added subsequently to inhibit sialidase expression.

[0188] An advantageous inhibitory polynucleotide for inhibition of sialidases in mammalian cells comprise (i) a first guide strand sequence comprising a contiguous 19 or 20 or 21 or 22 nucleotide sequence that is perfectly complementary to a natural mammalian cellular mRNA encoding a sialidase and (ii) a first passenger strand sequence comprising a contiguous 19 or 20 or 21 or 22 nucleotide sequence that is at least 78% complementary to the first guide strand sequence, wherein the first guide strand and first passenger strand sequence are separated by between 5 and 35 nucleotides and (iii) a second guide strand sequence comprising a contiguous 19 or 20 or 21 or 22 nucleotide sequence that is perfectly complementary to the same natural mammalian cellular mRNA as the first guide strand sequence and (iv) a second passenger strand sequence comprising a contiguous 19 or 20 or 21 or 22 nucleotide sequence that is at least 78% complementary to the second guide strand sequence, wherein the second guide strand and second passenger strand sequence are separated by between 5 and 35 nucleotides, and wherein the first and second guide strand sequences are different from each other and are operably linked to the same promoter that is active in a mammalian cell. Exemplary natural mammalian cellular mRNAs encoding sialidases comprise a nucleotide sequence that is at least 95%, 96%, 97%, 98% or 99% identical to, or 100% identical to a sequence selected from SEQ ID NOs: 13-18 and SEQ ID NOs: 570-571.

[0189] One CHO sialidase that removes sialic acid from proteins produced by CHO cells is Neu3. An advantageous polynucleotide for increasing the sialic acid content of proteins produced by CHO cells comprises or encodes a Neu3-inhibiting multi-hairpin amiRNA sequence. The Neu3-inhibiting multi-hairpin amiRNA sequence comprises a first guide strand sequence comprising a contiguous 19 or 20 or 21 or 22 nucleotide sequence complementary to CHO Neu3 mRNA (a sequence selected from SEQ ID NOs: 13 and 571) and a first passenger strand sequence comprising a contiguous 19 or 20 or 21 or 22 nucleotide sequence that is at least 78% identical to the reverse complement of the first guide strand sequence. The Neu3-inhibiting multi-hairpin amiRNA sequence further comprises a second guide strand sequence comprising a contiguous 19 or 20 or 21 or 22 nucleotide sequence complementary to CHO Neu3 mRNA and a second passenger strand sequence comprising a contiguous 19 or 20 or 21 or 22 nucleotide sequence that is at least 78% identical to the reverse complement of the second guide strand sequence, and wherein the first and second guide strand sequences are different from each other and operably linked to the same promoter. The Neu3-inhibiting multi-hairpin amiRNA sequence may optionally comprise a third guide strand sequence comprising a contiguous 19 or 20 or 21 or 22 nucleotide sequence complementary to CHO Neu3 mRNA and a third passenger strand sequence comprising a contiguous 19 or 20 or 21 or 22 nucleotide sequence that is at least 78% identical to the reverse complement of the third guide strand sequence, and wherein the first, second and third guide strand sequences are all different from each other and operably linked to the same promoter. Each guide strand sequence is separated from its respective passenger strand sequence by between 5 and 35 bases. Exemplary sequences for separating a guide strand sequence from its passenger strand sequence are sequences that comprise a nucleotide sequence selected from SEQ ID NO: 241-250. Exemplary guide strand sequences for inhibiting Cricetulus griseus Neu3 and their respective passenger strand sequences are SEQ ID NOs: 85 and 170, SEQ ID NOs: 86 and 171, SEQ ID NOs: 87 and 172, SEQ ID NOs: 88 and 173, SEQ ID NOs: 89 and 174 and SEQ ID NOs: 565 and 566. Exemplary multi-hairpin amiRNAs for inhibition of Neu3 sialidase in CHO cells include nucleotide sequences SEQ ID NOs: 212-216 and 567. A CHO cell comprising one of these multi-hairpin amiRNAs or a polynucleotide encoding them is an aspect of the invention.

[0190] One CHO sialidase that removes sialic acid from proteins produced by CHO cells is Neu2. An advantageous polynucleotide for increasing the sialic acid content of proteins produced by CHO cells comprises or encodes a Neu2-inhibiting multi-hairpin amiRNA sequence. The Neu2-inhibiting multi-hairpin amiRNA sequence comprises a first guide strand sequence comprising a contiguous 19 or 20 or 21 or 22 nucleotide sequence complementary to the CHO Neu2 mRNA (i.e. a sequence selected from SEQ ID NOs: 15 and 570) and a first passenger strand sequence comprising a contiguous 19 or 20 or 21 or 22 nucleotide sequence that is at least 78% identical to the reverse complement of the first guide strand sequence. The Neu2-inhibiting multi-hairpin amiRNA sequence further comprises a second guide strand sequence comprising a contiguous 19 or 20 or 21 or 22 nucleotide sequence complementary to the CHO Neu2 mRNA and a second passenger strand sequence comprising a contiguous 19 or 20 or 21 or 22 nucleotide sequence that is at least 78% identical to the reverse complement of the second guide strand sequence, and wherein the first and second guide strand sequences are different from each other and operably linked to the same promoter. The Neu2-inhibiting multi-hairpin amiRNA sequence may optionally comprise a third guide strand sequence comprising a contiguous 19 or 20 or 21 or 22 nucleotide sequence complementary to the CHO Neu2 mRNA and a third passenger strand sequence comprising a contiguous 19 or 20 or 21 or 22 nucleotide sequence that is at least 78% identical to the reverse complement of the third guide strand sequence, and wherein the first, second and third guide strand sequences are all different from each other and operably linked to the same promoter. Each guide strand sequence is separated from its respective passenger strand sequence by between 5 and 35 bases. Exemplary sequences for separating a guide strand sequence from its passenger strand sequence are sequences that comprise a sequence selected from SEQ ID NO: 241-250. Exemplary guide strand nucleotide sequences for inhibiting Cricetulus griseus Neu2 and their respective passenger strand nucleotide sequences are SEQ ID NOs: 90 and 175, SEQ ID NOs: 91 and 176, SEQ ID NOs: 92 and 177, SEQ ID NOs: 93 and 178, SEQ ID NOs: 94 and 179. Exemplary multi-hairpin amiRNAs for inhibition of Neu2 sialidase in CHO cells include nucleotide sequences SEQ ID NOs: 217-221, 568, 595 and 596. A CHO cell comprising one of these multi-hairpin amiRNAs or a polynucleotide encoding them is an aspect of the invention.

[0191] Expression of sialidases Neu2 and Neu3 in a mammalian cell can be simultaneously inhibited using an inhibitory polynucleotide comprising or encoding multi-amiRNA hairpins with guides complementary to each of Neu2 and Neu3 mRNAs. This inhibitory polynucleotide comprises (i) a first guide strand sequence comprising a contiguous 19 or 20 or 21 or 22 nucleotide sequence that is perfectly complementary to a natural mammalian cellular mRNA encoding a Neu2 sialidase and (ii) a first passenger strand sequence comprising a contiguous 19 or 20 or 21 or 22 nucleotide sequence that is at least 78% complementary to the first guide strand sequence, wherein the first guide strand and first passenger strand sequence are separated by between 5 and 35 nucleotides and (iii) a second guide strand sequence comprising a contiguous 19 or 20 or 21 or 22 nucleotide sequence that is perfectly complementary to the same natural mammalian cellular mRNA encoding a Neu2 sialidase as the first guide strand sequence and (iv) a second passenger strand sequence comprising a contiguous 19 or 20 or 21 or 22 nucleotide sequence that is at least 78% complementary to the second guide strand sequence, wherein the second guide strand and second passenger strand sequence are separated by between 5 and 35 nucleotides, and wherein the first and second guide strand sequences are different from each other and are operably linked to the same promoter that is active in a mammalian cell; and (v) a third guide strand sequence comprising a contiguous 19 or 20 or 21 or 22 nucleotide sequence that is perfectly complementary to a natural mammalian cellular mRNA encoding a Neu3 sialidase and (vi) a third passenger strand sequence comprising a contiguous 19 or 20 or 21 or 22 nucleotide sequence that is at least 78% complementary to the third guide strand sequence, wherein the third guide strand and third passenger strand sequence are separated by between 5 and 35 nucleotides and (vii) a fourth guide strand sequence comprising a contiguous 19 or 20 or 21 or 22 nucleotide sequence that is perfectly complementary to the same natural mammalian cellular mRNA encoding a Neu3 sialidase as the third guide strand sequence and (viii) a fourth passenger strand sequence comprising a contiguous 19 or 20 or 21 or 22 nucleotide sequence that is at least 78% complementary to the fourth guide strand sequence, wherein the fourth guide strand and fourth passenger strand sequence are separated by between 5 and 35 nucleotides, and wherein the third and fourth guide strand sequences are different from each other and are operably linked to the same promoter that is active in a mammalian cell. Optionally the first, second, third and fourth guide strand sequences are all operably linked to the same promoter active in a mammalian cell. Exemplary natural mammalian cellular mRNAs encoding Neu2 sialidases comprise a sequence that is at least 95%, 96%, 97%, 98% or 99% identical to, or 100% identical to a sequence selected from SEQ ID NOs: 15-17 and 570. Exemplary natural mammalian cellular mRNAs encoding Neu3 sialidases comprise a sequence that is at least 95%, 96%, 97%, 98% or 99% identical to, or 100% identical to a sequence selected from SEQ ID NOs: 13, 14, 18 and 571. Exemplary multi-hairpin amiRNAs and polynucleotides encoding them for inhibition of Neu2 and Neu3 sialidases in CHO cells include nucleotide sequences SEQ ID NOs: 222-225 and 569. A CHO cell comprising one of these multi-hairpin amiRNAs or a polynucleotide encoding them is an aspect of the invention.

[0192] A method for producing secreted proteins with increased sialic acid levels from mammalian cells comprises (i) introducing into a mammalian cell an inhibitory polynucleotide for inhibiting expression of a sialidase, wherein the inhibitory polynucleotide comprises or encodes a multi-hairpin amiRNA for expression of two or more interfering RNA guide sequences complementary to the same natural mammalian mRNA, and wherein the natural mammalian mRNA encodes a sialidase (for example but not limited to Neu2 or Neu3), and (ii) introducing into the same mammalian cell a gene encoding a protein to be secreted, the gene expressible in the mammalian cell. The two sequences may be introduced in any order: for example, the inhibitory polynucleotide may be introduced first and the gene encoding a protein to be secreted may be introduced second, the gene encoding a protein to be secreted may be introduced first and the inhibitory polynucleotide may be introduced second, or the two sequences may be introduced to the mammalian cell at the same time. The inhibitory polynucleotide and the gene encoding the protein to be secreted may be introduced to the mammalian cell on the same DNA molecule. In some instances, the protein to be secreted is a therapeutic protein. Preferably the secreted protein is not naturally produced by the cell. Preferably the cell is a CHO cell. The method may further comprise growing the cell under conditions where it produces the secreted protein. The method may further comprise purifying the secreted protein. Examples of therapeutic proteins that may benefit from sialylation include, but are not limited to, erythropoietin (EPO), clotting factors such as Factor VII, Factor IX, Factor X, Protein C, antithrombin III or thrombin, carbohydrate antigens and serum biomarkers, cytokines such as interferon α, interferon β, interferon γ, interferon ω, Granulocyte-colony Stimulating Factor (GCSF) or Granulocyte Macrophage Colony-Stimulating Factor (GM-CSF), receptors, antibodies or immunoglobulins such as IgG, IgG fragments, IgG fusions, and IgM, soluble IgE receptor α-chain, immuno-adhesion proteins and other Fc fusion proteins such as soluble TNF receptor-Fc fusion proteins; RAGE-Fc fusion protein, interleukins; urokinase; chymase; and urea trypsin inhibitor, IGF-binding protein; growth factors such as epidermal growth factor (EGF) or vascular endothelial growth factor (VEGF), annexin V fusion protein; angiostatin, myeloid progenitor inhibitory factor-1; osteoprotegerin, α-1-antitrypsin; α-fetoproteins, DNaseII, human plasminogen, Kringle 3 domain of human plasminogen; glucocerebrosidase; TNF binding protein 1; Follicle stimulating hormone, Thyroid-stimulating hormone, Chorionogonadotropin, Luteinizing Hormone, cytotoxic T lymphocyte associated antigen 4-Ig, transmembrane activator and calcium modulator and cyclophilin ligand; glucagon like protein 1, IL-15 or IL-2 receptor agonist. A therapeutic protein may comprise an antibody, a functional fragment or derivative thereof and more specifically any antibody, functional fragment or derivative thereof that functions to deplete target cells or molecules in a patient. Specific examples of such target cells include tumor cells, virus-infected cells, allogenic cells, pathological immunocompetent cells {e.g., B lymphocytes, T lymphocytes, antigen-presenting cells, etc.) involved in cancers, allergies, autoimmune diseases, allogenic reactions. Most preferred target cells within the context of this invention are immune cells, tumor cells and virus-infected cells. The therapeutic antibodies Mays, for instance, mediate B-lymphocyte depletion (anti-inflammatory antibodies such as anti-CD20 antibodies) or a cytotoxic effect or cell lysis (pro-inflammatory antibodies), particularly by antibody-dependent cell-mediated cytotoxicity (ADCC). Therapeutic antibodies according to the invention may be directed to circulatory mediators of inflammation, cell surface epitopes overexpressed by cancer cells, or viral epitopes. A therapeutic antibody may be selected from the group comprising rituximab, trastuzumab, cetuximab, motavizumab, palivizumab, alemtuzumab, but also comprising for instance, abciximab, adalimumab, alemtuzumab, basiliximab, belimumab, benralizumab, bevacizumab, brentuximab, canakinumab, catumaxomab, daratumumab, elotuzumab, epratuzumab, farletuzumab, galiximab, gemtuzumabozogamicin, golimumab, ibritumomabtiuxetan, ipilimumab, lumiliximab, necitumumab, nimotuzumab, ocrelizumab, ofatumumab, omalizumab, oregovomab, pertuzumab, raxibacumab, tocilizumab, tositumomab, ustekinumab, zalutumumab, and zanolimumab, preferably infliximab.

[0193] The invention also includes a cell comprising a polynucleotide, which comprises or encodes a multi-hairpin amiRNA. The amiRNA introduced directly into the cell or expressed from the polynucleotide in the cell can inhibit expression of a sialidase. The cell can also include a heterologous polynucleotide encoding a secreted protein. When the polynucleotide encoding the secreted protein is expressed, the amiRNA inhibits expression of the sialidase resulting in increased sialylation of the secreted proteins. The cell is preferably a mammalian cell line and can be one of a population of such cells, such as a cell line.

### 5.7 Micro RNA for Inhibiting the Interferon Receptor

[0194] Interferons are produced in response to viral attacks on cells, and their effect is to reduce cell growth and proliferation. Attempts to produce interferons in large quantities using mammalian cells are often stymied by the action of the interferons to slow growth. Interferons act on cells through an interferon receptor which has two subunits: IFNAR1 and IFNAR2. Inhibiting or reducing expression of the interferon receptor in a producer cell reduces the susceptibility of that cell to the inhibitory effects of interferons, thereby enhancing its ability to produce interferons. Reducing expression of either subunit disrupts the ability of interferons to signal and reduce cellular growth, thereby enhancing the ability of a cell to produce interferons for example beta interferon. Preferably the expression of a subunit of the interferon receptor is reduced or inhibited by RNA interference. The RNA interference may be mediated by an artificial micro-RNA gene.

[0195] A gene encoding an interferon polypeptide may be introduced into a cell that contains an inhibitory polynucleotide comprising a gene expressing one or more interfering RNA sequences to reduce expression of a subunit of an interferon receptor. A gene encoding an interferon polypeptide may be introduced into a cell as part of a DNA molecule that also contains an inhibitory polynucleotide comprising a gene expressing one or more interfering RNA sequences to reduce expression of a subunit of the interferon receptor. As described in Section 5.2.6, it is advantageous to incorporate the multi-amiRNA hairpins encoding the interfering RNAs into the 3′ UTR of the selectable marker.

[0196] An advantageous inhibitory polynucleotide for inhibition of the interferon receptor in mammalian cells comprises or encodes (i) a first guide strand sequence comprising a contiguous 19 or 20 or 21 or 22 nucleotide sequence that is perfectly complementary to a natural mammalian cellular mRNA encoding a subunit of the interferon receptor and (ii) a first passenger strand sequence comprising a contiguous 19 or 20 or 21 or 22 nucleotide sequence that is at least 78% complementary to the first guide strand sequence, wherein the first guide strand and first passenger strand sequence are separated by between 5 and 35 nucleotides and (iii) a second guide strand sequence comprising a contiguous 19 or 20 or 21 or 22 nucleotide sequence that is perfectly complementary to the same natural mammalian cellular mRNA as the first guide strand sequence and (iv) a second passenger strand sequence comprising a contiguous 19 or 20 or 21 or 22 nucleotide sequence that is at least 78% complementary to the second guide strand sequence, wherein the second guide strand and second passenger strand sequence are separated by between 5 and 35 nucleotides, and wherein the first and second guide strand sequences are different from each other and are operably linked to the same promoter that is active in a mammalian cell. Exemplary natural mammalian cellular mRNAs encoding interferon receptor subunits comprise a nucleotide sequence that is at least 95%, 96%, 97%, 98% or 99% identical to, or 100% identical to a sequence selected from SEQ ID NOs: 19-22.

[0197] The CHO IFNAR1 gene is encoded by an mRNA comprising a nucleotide sequence that is at least 95%, 96%, 97%, 98% or 99% identical to, or 100% identical to SEQ ID NO: 19. An advantageous polynucleotide for inhibiting expression of the interferon receptor in CHO cells comprises an IFNAR1-inhibiting multi-hairpin amiRNA sequence. The IFNAR1-inhibiting multi-hairpin amiRNA sequence comprises a first guide strand sequence comprising a contiguous 19 or 20 or 21 or 22 nucleotide sequence complementary to SEQ ID NO: 19 and a first passenger strand sequence comprising a contiguous 19 or 20 or 21 or 22 nucleotide sequence that is at least 78% identical to the reverse complement of the first guide strand sequence. The IFNAR1-inhibiting multi-hairpin amiRNA sequence further comprises a second guide strand sequence comprising a contiguous 19 or 20 or 21 or 22 nucleotide sequence complementary to SEQ ID NO: 19 and a second passenger strand sequence comprising a contiguous 19 or 20 or 21 or 22 nucleotide sequence that is at least 78% identical to the reverse complement of the second guide strand sequence, and wherein the first and second guide strand sequences are different from each other and operably linked to the same promoter. The IFNAR1-inhibiting multi-hairpin amiRNA sequence may optionally comprise a third guide strand sequence comprising a contiguous 19 or 20 or 21 or 22 nucleotide sequence complementary to SEQ ID NO: 19 and a third passenger strand sequence comprising a contiguous 19 or 20 or 21 or 22 nucleotide sequence that is at least 78% identical to the reverse complement of the third guide strand sequence, and wherein the first, second and third guide strand sequences are all different from each other and operably linked to the same promoter. Each guide strand sequence is separated from its respective passenger strand sequence by between 5 and 35 bases. Exemplary sequences for separating a guide strand sequence from its passenger strand sequence are sequences that comprise a nucleotide sequence selected from SEQ ID NO: 241-250. Exemplary guide strand sequences for inhibiting CHO IFNAR1 and their respective passenger strand sequences are SEQ ID NOs: 95 and 180, SEQ ID NOs: 96 and 181, SEQ ID NOs: 97 and 182, SEQ ID NOs: 98 and 183, SEQ ID NOs: 99 and 184, SEQ ID NOs: 100 and 185 and SEQ ID NOs: 101 and 186. Exemplary multi-hairpin amiRNAs for inhibition of IFNAR1 in CHO cells include SEQ ID NOs: 226-230.

[0198] The CHO IFNAR2 gene is encoded by an mRNA comprising a nucleotide sequence that is at least 95%, 96%, 97%, 98% or 99% identical to, or 100% identical to SEQ ID NO: 20. An advantageous polynucleotide for inhibiting expression of the interferon receptor in CHO cells comprises or encodes an IFNAR2-inhibiting multi-hairpin amiRNA sequence. The IFNAR2-inhibiting multi-hairpin amiRNA sequence comprises a first guide strand sequence comprising a contiguous 19 or 20 or 21 or 22 nucleotide sequence complementary to SEQ ID NO: 20 and a first passenger strand sequence comprising a contiguous 19 or 20 or 21 or 22 nucleotide sequence that is at least 78% identical to the reverse complement of the first guide strand sequence. The IFNAR2-inhibiting multi-hairpin amiRNA sequence further comprises a second guide strand sequence comprising a contiguous 19 or 20 or 21 or 22 nucleotide sequence complementary to SEQ ID NO: 20 and a second passenger strand sequence comprising a contiguous 19 or 20 or 21 or 22 nucleotide sequence that is at least 78% identical to the reverse complement of the second guide strand sequence, and wherein the first and second guide strand sequences are different from each other and operably linked to the same promoter. The IFNAR2-inhibiting multi-hairpin amiRNA sequence may optionally comprise a third guide strand sequence comprising a contiguous 19 or 20 or 21 or 22 nucleotide sequence complementary to SEQ ID NO: 20 and a third passenger strand sequence comprising a contiguous 19 or 20 or 21 or 22 nucleotide sequence that is at least 78% identical to the reverse complement of the third guide strand sequence, and wherein the first, second and third guide strand sequences are all different from each other and operably linked to the same promoter. Each guide strand sequence is separated from its respective passenger strand sequence by between 5 and 35 bases. Exemplary sequences for separating a guide strand sequence from its passenger strand sequence are sequences that comprise a sequence selected from SEQ ID NO: 241-250. Exemplary guide strand sequences for inhibiting IFNAR2 and their respective passenger strand sequences are SEQ ID NOs: 102 and 187, SEQ ID NOs: 103 and 188, SEQ ID NOs:104 and 189, SEQ ID NOs: 105 and 190, SEQ ID NOs: 106 and 191 and SEQ ID NOs: 107 and 192. Exemplary multi-hairpin amiRNAs for inhibition of IFNAR2 in CHO cells include SEQ ID NOs: 231-235.

[0199] Expression of both interferon receptor subunits in a mammalian cell can be simultaneously inhibited using an inhibitory polynucleotide comprising or encoding multi-amiRNA hairpins with guides complementary to each of IFNAR1 and IFNAR2 mRNAs. This inhibitory polynucleotide comprises or encodes (i) a first guide strand sequence comprising a contiguous 19 or 20 or 21 or 22 nucleotide sequence that is perfectly complementary to a natural mammalian cellular mRNA encoding IFNAR1 and (ii) a first passenger strand sequence comprising a contiguous 19 or 20 or 21 or 22 nucleotide sequence that is at least 78% complementary to the first guide strand sequence, wherein the first guide strand and first passenger strand sequence are separated by between 5 and 35 nucleotides and (iii) a second guide strand sequence comprising a contiguous 19 or 20 or 21 or 22 nucleotide sequence that is perfectly complementary to the same natural mammalian cellular mRNA encoding IFNAR1 as the first guide strand sequence and (iv) a second passenger strand sequence comprising a contiguous 19 or 20 or 21 or 22 nucleotide sequence that is at least 78% complementary to the second guide strand sequence, wherein the second guide strand and second passenger strand sequence are separated by between 5 and 35 nucleotides, and wherein the first and second guide strand sequences are different and the polynucleotides encoding them are operably linked to the same promoter that is active in a mammalian cell; and (v) a third guide strand sequence comprising a contiguous 19 or 20 or 21 or 22 nucleotide sequence that is perfectly complementary to a natural mammalian cellular mRNA encoding IFNAR2 and (vi) a third passenger strand sequence comprising a contiguous 19 or 20 or 21 or 22 nucleotide sequence that is at least 78% complementary to the third guide strand sequence, wherein the third guide strand and third passenger strand sequence are separated by between 5 and 35 nucleotides and (vii) a fourth guide strand sequence comprising a contiguous 19 or 20 or 21 or 22 nucleotide sequence that is perfectly complementary to the same natural mammalian cellular mRNA encoding IFNAR2 as the third guide strand sequence and (viii) a fourth passenger strand sequence comprising a contiguous 19 or 20 or 21 or 22 nucleotide sequence that is at least 78% complementary to the fourth guide strand sequence, wherein the fourth guide strand and fourth passenger strand sequence are separated by between 5 and 35 nucleotides, and wherein the third and fourth guide strand sequences are different and the polynucleotides encoding them are operably linked to the same promoter that is active in a mammalian cell. Optionally the polynucleotides encoding the first, second, third and fourth guide strand sequences are all operably linked to the same promoter active in a mammalian cell. Exemplary natural mammalian cellular mRNAs encoding IFNAR1 comprise a sequence that is at least 95%, 96%, 97%, 98% or 99% identical to, or 100% identical to a sequence selected from SEQ ID NOs: 19 and 21. Exemplary natural mammalian cellular mRNAs encoding IFNAR2 comprise a sequence that is at least 95%, 96%, 97%, 98% or 99% identical to, or 100% identical to a sequence selected from SEQ ID NOs: 20 and 22. Exemplary multi-hairpin amiRNAs for inhibition of IFNAR1 and IFNAR2 in CHO cells include SEQ ID NOs: 236-240.

[0200] A method for producing interferons from mammalian cells comprises (i) introducing into a mammalian cell an inhibitory polynucleotide for inhibiting expression of the interferon receptor, wherein the inhibitory polynucleotide comprises or encodes a multi-hairpin amiRNA for expression of two or more interfering RNA guide sequences complementary to the same natural mammalian mRNA, and wherein the natural mammalian mRNA encodes a subunit of the interferon receptor (for example IFNAR1 or IFNAR2), and (ii) introducing into the same mammalian cell a gene encoding an interferon, the gene expressible in the mammalian cell. The two sequences may be introduced in any order: for example, the inhibitory polynucleotide may be introduced first and the gene encoding the interferon may be introduced second, the gene encoding the interferon may be introduced first and the inhibitory polynucleotide may be introduced second, or the two sequences may be introduced to the mammalian cell at the same time. The gene expressing the interferon may be carried on the same DNA molecule as the multi-hairpin amiRNA, or they may be on separate DNA molecules. The method may further comprise growing the cell under conditions that result in expression of the interferon. The method may further comprise purifying the interferon.

[0201] The invention also includes a cell comprising a polynucleotide, which comprises or encodes a multi-hairpin amiRNA. The amiRNA introduced into the cell directly or expressed from the polynucleotide in the cell can inhibit expression of a subunit of the interferon receptor. The cell can also include a heterologous polynucleotide encoding an interferon. When the polynucleotide encoding the interferon is expressed, the interferon causes reduced toxicity to the cell compared with a control cell lacking the polynucleotide comprising or encoding the amiRNA sequence. The cell is preferably a mammalian cell line and can be one of a population of such cells, such as a cell line.

### 5.8 Micro RNA for Inhibiting Lipases

[0202] Lipoprotein lipase is a protein produced by CHO cells that is often difficult to purify away from biopharmaceuticals manufactured in CHO cells. Residual lipoprotein lipase can degrade polysorbate that is often used in final product formulations. Deletion of the lipoprotein lipase genes from CHO cells can be used to reduce lipoprotein lipase contaminants from proteins purified from CHO cell cultures (Chui et. al., 2017. Biotechnol Bioeng. 114: 1006-1015. “Knockout of a difficult-to-remove CHO host cell protein, lipoprotein lipase, for improved polysorbate stability in monoclonal antibody formulations”). Other fatty acid hydrolases implicated in polysorbate degradation include phospholipase B-like 2 (exemplary mRNA nucleotide sequence SEQ ID NO: 590), lysozomal acid lipase (exemplary mRNA nucleotide sequence SEQ ID NO: 591) and acid ceramidase (exemplary mRNA nucleotide sequence SEQ ID NO: 592). Reducing the expression of these proteins is also advantageous for reducing contaminating host cell protein in protein therapeutics and reducing degradation of polysorbate in final formulations. The benefit of an RNA interference approach is that it facilitates modification of cell lines that have already been developed to express a protein product: artificial micro RNAs or polynucleotides encoding them can be easily added subsequently to inhibit lipoprotein lipase expression.

[0203] An advantageous inhibitory polynucleotide for inhibition of fatty acid hydrolase expression in mammalian cells comprise or encodes (i) a first guide strand sequence comprising a contiguous 19 or 20 or 21 or 22 nucleotide sequence that is perfectly complementary to a natural mammalian cellular mRNA encoding a fatty acid hydrolase and (ii) a first passenger strand sequence comprising a contiguous 19 or 20 or 21 or 22 nucleotide sequence that is at least 78% complementary to the first guide strand sequence, wherein the first guide strand and first passenger strand sequence are separated by between 5 and 35 nucleotides and (iii) a second guide strand sequence comprising a contiguous 19 or 20 or 21 or 22 nucleotide sequence that is perfectly complementary to the same natural mammalian cellular mRNA as the first guide strand sequence and (iv) a second passenger strand sequence comprising a contiguous 19 or 20 or 21 or 22 nucleotide sequence that is at least 78% complementary to the second guide strand sequence, wherein the second guide strand and second passenger strand sequence are separated by between 5 and 35 nucleotides, and wherein the first and second guide strand sequences are different from each other and are operably linked to the same promoter that is active in a mammalian cell. Exemplary natural mammalian cellular mRNA encoding lipoprotein lipase comprise a nucleotide sequence that is at least 95%, 96%, 97%, 98% or 99% identical to, or 100% identical to a sequence selected from SEQ ID NO: 572 or 590-592.

[0204] An advantageous polynucleotide for reducing lipoprotein lipase contamination in proteins produced by CHO cells comprises or encodes a lipoprotein lipase-inhibiting multi-hairpin amiRNA sequence. The lipoprotein lipase-inhibiting multi-hairpin amiRNA sequence comprises a first guide strand sequence comprising a contiguous 19 or 20 or 21 or 22 nucleotide sequence complementary to SEQ ID NO: 572 and a first passenger strand sequence comprising a contiguous 19 or 20 or 21 or 22 nucleotide sequence that is at least 78% identical to the reverse complement of the first guide strand sequence. The lipoprotein lipase-inhibiting multi-hairpin amiRNA sequence further comprises a second guide strand sequence comprising a contiguous 19 or 20 or 21 or 22 nucleotide sequence complementary to SEQ ID NO: 572 and a second passenger strand sequence comprising a contiguous 19 or 20 or 21 or 22 nucleotide sequence that is at least 78% identical to the reverse complement of the second guide strand sequence, and wherein the first and second guide strand sequences are different from each other and operably linked to the same promoter. The lipoprotein lipase-inhibiting multi-hairpin amiRNA sequence may optionally comprise a third guide strand sequence comprising a contiguous 19 or 20 or 21 or 22 nucleotide sequence complementary to SEQ ID NO: 572 and a third passenger strand sequence comprising a contiguous 19 or 20 or 21 or 22 nucleotide sequence that is at least 78% identical to the reverse complement of the third guide strand sequence, and wherein the first, second and third guide strand sequences are all different from each other and operably linked to the same promoter. Each guide strand sequence is separated from its respective passenger strand sequence by between 5 and 35 bases. Exemplary sequences for separating a guide strand sequence from its passenger strand sequence are sequences that comprise a nucleotide sequence selected from SEQ ID NO: 241-250. Exemplary guide strand sequences for inhibiting Cricetulus griseus lipoprotein lipase and their respective passenger strand sequences are SEQ ID NOs: 573 and 579, SEQ ID NOs: 574 and 580, SEQ ID NOs: 575 and 581, SEQ ID NOs: 576 and 582, SEQ ID NOs: 577 and 583 and SEQ ID NOs:578 and 584. Exemplary multi-hairpin amiRNAs for inhibition of lipoprotein lipase in CHO cells include nucleotide sequences SEQ ID NOs: 585-589.

[0205] A method for producing secreted proteins with reduced lipoprotein lipase contaminants from mammalian cells comprises (i) introducing into a mammalian cell an inhibitory polynucleotide for inhibiting expression of lipoprotein lipase, wherein the inhibitory polynucleotide comprises or encodes a multi-hairpin amiRNA for expression of two or more interfering RNA guide sequences complementary to the same natural mammalian mRNA, and wherein the natural mammalian mRNA encodes a lipoprotein lipase, and (ii) introducing into the same mammalian cell a gene encoding a protein to be secreted, the gene expressible in the mammalian cell. The two sequences may be introduced in any order: for example the inhibitory polynucleotide may be introduced first and the gene encoding a protein to be secreted may be introduced second, the gene encoding a protein to be secreted may be introduced first and the inhibitory polynucleotide may be introduced second, or the two sequences may be introduced to the mammalian cell at the same time. In some instances, the protein to be secreted is a therapeutic protein. Preferably the secreted protein is not naturally produced by the cell. Preferably the cell is a CHO cell. The method may further comprise growing the cell under conditions where it produces the secreted protein. The method may further comprise purifying the secreted protein. Examples of therapeutic proteins that may benefit from reduced lipoprotein lipase levels include, but are not limited to, erythropoietin (EPO), clotting factors such as Factor VII, Factor IX, Factor X, Protein C, antithrombin III or thrombin, carbohydrate antigens and serum biomarkers, cytokines such as interferon α, interferon β, interferon γ, interferon ω, Granulocyte-colony Stimulating Factor (GCSF) or Granulocyte Macrophage Colony-Stimulating Factor (GM-CSF), receptors, antibodies or immunoglobulins such as IgG, IgG fragments, IgG fusions, and IgM, soluble IgE receptor α-chain, immuno-adhesion proteins and other Fc fusion proteins such as soluble TNF receptor-Fc fusion proteins; RAGE-Fc fusion protein, interleukins; urokinase, chymase; and urea trypsin inhibitor; IG-binding protein; growth factors such as epidermal growth factor (EGF) or vascular endothelial growth factor (VEGF); annexin V fusion protein; angiostatin, myeloid progenitor inhibitory factor-1; osteoprotegerin, α-1-antitrypsin; α-fetoproteins, DNaseII, human plasminogen, Kringle 3 domain of human plasminogen; glucocerebrosidase, TNF binding protein 1; Follicle stimulating hormone; Thyroid-stimulating hormone, Chorionogonadotropin, Luteinizing Hormone, cytotoxic T lymphocyte associated antigen 4-11 g; transmembrane activator and calcium modulator and cyclophilin ligand; glucagon like protein 1, IL-15 or IL-2 receptor agonist. A therapeutic protein may comprise an antibody, a functional fragment or derivative thereof and more specifically any antibody, functional fragment or derivative thereof that functions to deplete target cells or molecules in a patient. Specific examples of such target cells include tumor cells, virus-infected cells, allogenic cells, pathological immunocompetent cells {e.g., B lymphocytes, T lymphocytes, antigen-presenting cells, etc.) involved in cancers, allergies, autoimmune diseases, allogenic reactions. Most preferred target cells within the context of this invention are immune cells, tumor cells and virus-infected cells. The therapeutic antibodies may, for instance, mediate 13 lymphocyte depletion (anti-inflammatory antibodies such as anti-CD20 antibodies) or a cytotoxic effect or cell lysis (pro-inflammatory antibodies), particularly by antibody-dependent cell-mediated cytotoxicity (ADCC). Therapeutic antibodies according to the invention may be directed to circulatory mediators of inflammation, cell surface epitopes overexpressed by cancer cells, or viral epitopes. A therapeutic antibody may be selected from the group comprising rituximab, trastuzumab, cetuximab, motavizumab, palivizumab, alemtuzumab, but also comprising for instance, abciximab, adalimumab, alemtuzumab, basiliximab, belimumab, benralizumab, bevacizumab, brentuximab, canakinumab, catumaxomab, daratumumab, elotuzumab, epratuzumab, farletuzumab, galiximab, gemtuzumabozogamicin, golimumab, ibritumomabtiuxetan, ipilimumab, lumiliximab, necitumumab, nimotuzumab, ocrelizumab, ofatumumab, omalizumab, oregovomab, pertuzumab, raxibacumab, tocilizumab, tositumomab, ustekinumab, zalutumumab, and zanolimumab, preferably infliximab.

### 5.9 Dihydrofolate Reductase

[0206] Another example of a selectable marker gene that may be advantageously incorporated into a gene transfer polynucleotide to provide a growth advantage to the cell by allowing the cell to synthesize a metabolically useful substance is a gene encoding dihydrofolate reductase (DHFR, for example a polypeptide sequence selected from SEQ ID NO: 292-293). DHFR is required for catalyzing the reduction of 5,6-dihydrofolate (DHF) to 5,6,7,8-tetrahydrofolate (THF), which is a proton shuttle required for the de novo synthesis of purines, thymidylic acid, and certain amino acids. Some cell lines do not express enough DHFR to survive without added nucleoside precursors hypoxanthine and thymidine (HT). In these cells a transfected DHFR gene can function as a selectable marker by permitting growth in a hypoxanthine and thymidine-free medium. DHFR confers resistance to methotrexate (MTX). DHFR can be inhibited by higher levels of methotrexate. Selection protocols include introducing a construct comprising sequences encoding a DHFR selectable marker into a cell with or without an endogenous DHFR gene, and then treating the cell with inhibitors of DHFR such as methotrexate. The higher the levels of methotrexate that are used, the higher the level of DHFR expression is required to allow the cell to synthesize enough DHFR to survive. Preferably the DHFR gene is operably linked to a weak promoter or other sequence elements that attenuate expression as described above, such that high levels of expression can only occur if many copies of the gene transfer polynucleotide are present, or if they are integrated in a position in the genome where high levels of expression occur. In such cases it may be unnecessary to use a DHFR inhibitor such as methotrexate: simply synthesizing enough tetrahydrofolate for cell survival may provide a sufficiently stringent selection if expression of the DHFR is attenuated.

[0207] In some cell lines, for example HEK cells and Chinese hamster ovary (CHO) cells, there is enough DHFR enzyme expressed to enable the cell to survive without exogenously added HT. These cells can be manipulated by genome editing techniques including CRISPR/Cas9 to reduce or eliminate the activity of the DHFR enzyme. However even with CRISPR this is a laborious process that may introduce off-target mutations in other genes. An alternative method is to stably integrate into the cell genome a polynucleotide comprising a multi-hairpin amiRNA that targets the endogenous DHFR mRNA.

### 5.9.1 Micro RNA to Reduce Endogenous Dihydrofolate Reductase

[0208] An advantageous gene transfer polynucleotide for inhibition of dihydrofolate reductase in hamster cells comprises a dihydrofolate reductase-inhibiting multi-hairpin amiRNA sequence. The dihydrofolate reductase-inhibiting multi-hairpin amiRNA sequence comprises a first guide strand sequence comprising a contiguous 19 or 20 or 21 or 22 nucleotide sequence complementary to hamster DHFR mRNA (whose nucleotide sequence is given by SEQ ID NO: 22) and a first passenger strand sequence comprising a contiguous 19 or 20 or 21 or 22 nucleotide sequence that is at least 78% identical to the reverse complement of the first guide strand sequence. The dihydrofolate reductase-inhibiting multi-hairpin amiRNA sequence further comprises a second guide strand sequence comprising a contiguous 19 or 20 or 21 or 22 nucleotide sequence complementary to SEQ ID NO: 22 and a second passenger strand sequence comprising a contiguous 19 or 20 or 21 or 22 nucleotide sequence that is at least 78% identical to the reverse complement of the second guide strand sequence, and wherein the first and second guide strand sequences are different from each other. The dihydrofolate reductase-inhibiting multi-hairpin amiRNA sequence may optionally comprise a third guide strand sequence comprising a contiguous 19 or 20 or 21 or 22 nucleotide sequence complementary to SEQ ID NO: 22 and a third passenger strand sequence comprising a contiguous 19 or 20 or 21 or 22 nucleotide sequence that is at least 78% identical to the reverse complement of the third guide strand sequence, and wherein the first, second and third guide strand sequences are all different from each other. Each guide strand sequence is separated from its respective passenger strand sequence by between 5 and 35 bases. Exemplary sequences for separating a guide strand sequence from its passenger strand sequence are sequences that comprise a sequence selected from SEQ ID NOs: 241-250. Exemplary guide strand nucleotide sequences for inhibiting hamster dihydrofolate reductase and their respective passenger strand nucleotide sequences are SEQ ID NOs: 82 and 167, SEQ ID NOs: 83 and 168, SEQ ID NOs: 84 and 169, SEQ ID NOs: 607 and 617, SEQ ID NOs: 608 and 618, SEQ ID NOs: 609 and 619, SEQ ID NOs: 610 and 620, SEQ ID NOs: 611 and 621, SEQ ID NOs: 612 and 622, SEQ ID NOs: 613 and 623, SEQ ID NOs: 614 and 624, SEQ ID NOs: 615 and 625, and SEQ ID NOs: 616 and 626.

[0209] Multi-hairpin amiRNAs with nucleotide sequences SEQ ID NO: 210 and 627 each comprise guide strand sequences complementary to different sequences within the CHO dihydrofolate reductase mRNA target (nucleotide sequence SEQ ID NO: 22). These multi-hairpin amiRNA sequences each comprise a first guide strand sequence comprising a contiguous 19 or 20 or 21 or 22 nucleotide sequence complementary to SEQ ID NO: 22 and a first passenger strand sequence comprising a contiguous 19 or 20 or 21 or 22 nucleotide sequence that is at least 78% identical to the reverse complement of the first guide strand sequence. These multi-hairpin amiRNA sequences each further comprise a second guide strand sequence comprising a contiguous 19 or 20 or 21 or 22 nucleotide sequence complementary to SEQ ID NO: 22 and a second passenger strand sequence comprising a contiguous 19 or 20 or 21 or 22 nucleotide sequence that is at least 78% identical to the reverse complement of the second guide strand sequence, and wherein the first and second guide strand sequences are different from each other. These multi-hairpin amiRNA sequences each further comprise a third guide strand sequence comprising a contiguous 19 or 20 or 21 or 22 nucleotide sequence complementary to SEQ ID NO: 22 and a third passenger strand sequence comprising a contiguous 19 or 20 or 21 or 22 nucleotide sequence that is at least 78% identical to the reverse complement of the third guide strand sequence, and wherein the first, second and third guide strand sequences are all different from each other. Each guide strand sequence in each of these multi-hairpin amiRNA sequences is separated from its respective passenger strand sequence by between 5 and 35 bases. For multi-hairpin amiRNA with nucleotide sequences SEQ ID NO 210 and 627, each guide strand sequence is separated from its respective passenger strand sequence by a nucleotide sequence comprising SEQ ID NO: 241. Multi-hairpin amiRNA with nucleotide sequence SEQ ID NO: 210 comprises a first guide strand with nucleotide sequence SEQ ID NO: 82 and a first passenger strand with nucleotide sequence SEQ ID NO: 167; SEQ ID NO: 210 further comprises a second guide strand with nucleotide sequence SEQ ID NO: 83 and a second passenger strand with nucleotide sequence SEQ ID NO: 168; SEQ ID NO: 210 further comprises a third guide strand with nucleotide sequence SEQ ID NO: 84 and a third passenger strand with nucleotide sequence SEQ ID NO: 169. Guide strand sequences SEQ ID NO: 82, SEQ ID NO: 83, and SEQ ID NO: 84 are all complementary to the same natural cellular mRNA and are all different from each other. Multi-hairpin amiRNA with nucleotide sequence SEQ ID NO: 627 comprises a first guide strand sequence with nucleotide sequence SEQ ID NO: 612 and a first passenger strand sequence with nucleotide sequence SEQ ID NO: 622; SEQ ID NO: 627 further comprises a second guide strand with nucleotide sequence SEQ ID NO: 82 and a second passenger strand with nucleotide sequence SEQ ID NO: 167; SEQ ID NO: 627 further comprises a third guide strand with nucleotide sequence SEQ ID NO: 83 and a third passenger strand with nucleotide sequence SEQ ID NO: 168; SEQ ID NO: 627 further comprises a fourth guide strand with nucleotide sequence SEQ ID NO: 84 and a fourth passenger strand with nucleotide sequence SEQ ID NO: 169. Guide strand sequences SEQ ID NO: 612, SEQ ID NO: 82, SEQ ID NO: 83, and SEQ ID NO: 84 are all complementary to the same natural cellular mRNA and are all different from each other.

[0210] In one embodiment, a multi-hairpin amiRNA gene to express amiRNAs that inhibit dihydrofolate reductase are introduced into a cell lacking a functional glutamine synthetase gene. The resulting cell requires media supplemented with glutamine, hypoxanthine and thymidine (HT) in order to grow. In some embodiments dihydrofolate reductase expression is reduced but cells can still synthesize enough tetrahydrofolate to survive and thus do not require media supplemented with hypoxanthine and thymidine. However the amiRNA-mediated DHFR inhibition sensitizes the cells to methotrexate, which can then be used as a selective agent.

### 5.9.2 Complementation of THF Auxotrophy

[0211] In cells lacking a functional DHFR gene, including cells in which endogenous DHFR expression is reduced by RNA interference, an exogenously provided DHFR gene can function as a selectable marker by permitting THF synthesis and cell growth in hypoxanthine-thymidine (HT)-free medium. Preferably a gene transfer polynucleotide comprising the exogenous DHFR gene is introduced into the cell. Preferably the exogenous DHFR gene comprises sequence features that prevent its expression from being inhibited by any RNA interference that has been used to make the host cell auxotrophic for HT. If RNA interference molecules, including amiRNA guide strands, are directed against the coding portion of the endogenous DHFR, an exogenous gene encoding DHFR can avoid inhibition if the coding sequence is changed, for example by silent mutations in the targeted region. If RNA interference molecules, including amiRNA guide strands, are directed against the 3′ UTR or 5′ UTR portions of the endogenous DHFR, an exogenous gene encoding DHFR can avoid inhibition if the natural UTR sequences are replaced with alternative sequences, for example UTR sequences taken or adapted from other natural genes.

[0212] One selection method comprises introducing a gene transfer polynucleotide comprising sequences encoding a DHFR selectable marker, and then growing the cell in media that does not contain enough HT for the cells to survive in the absence of an exogenous gene encoding DHFR. Cells lacking a functional DHFR gene are also more susceptible to growth inhibition by methotrexate. Thus, an alternative selection method comprises introducing a gene transfer polynucleotide comprising sequences encoding a DHFR selectable marker, and then growing the cell in media that does not contain added HT, and where the media further comprises methotrexate, for example between 10 nM and 2 μM methotrexate.

[0213] Complementation of DHFR-deficient cells with an exogenously provided DHFR gene often includes an amplification step. That is, a gene transfer polynucleotide is introduced into DHFR-deficient mammalian cells, for example DHFR-deficient CHO cells. The gene transfer polynucleotide comprises a DHFR gene expressible in the mammalian cell, and a second gene also expressible in the mammalian cell. The cells are then grown in the absence of hypoxanthine and thymidine and over time is passaged into successively higher concentrations of methotrexate, for example the initial concentration of methotrexate is 10 nM, and after 5 days it is increased to 25 nM and after a further 5 days it is increased to 100 nM and so on. The result of this is to amplify the copy number of the DHFR gene provided on the gene transfer polynucleotide within the genome of the mammalian cell. This also amplifies the copy number of the second gene, and thus increases the expression level of the second gene. Gene amplification tends to result in concatemeric structures that are unstable. A preferable method for expressing a gene in a DHFR-deficient cell comprises the following steps: a gene transfer polynucleotide comprises a transposon comprising a DHFR gene expressible in the mammalian cell, and a second gene also expressible in the mammalian cell. The gene transfer polynucleotide is introduced into DHFR-deficient mammalian cells, for example DHFR-deficient CHO cells, together with a corresponding transposase that can integrate the transposon into the genome of the cell. After recovery from transfection (typically 24-72 hours) the cells are grown in selective media lacking hypoxanthine and thymidine and with the addition of the maximum desired concentrations of methotrexate, for example a concentration between 10 nM and 2 μM methotrexate. This selects for a high number of copies of the transposon, but each of these copies is independently integrated and thus will not experience concatemer-related instability. The cells are propagated in the selective media until the viability has exceeded a threshold value for example 80 or 90 of 95%, and then grown under appropriate conditions for expression of the expressible genes encoded on the transposon.

[0214] Preferably the exogenous open reading frame encoding DHFR is operably linked to a weak promoter or other sequence elements that attenuate expression, such that high levels of expression can only occur if many copies of the gene transfer polynucleotide are present, or if they are integrated in a position in the genome where high levels of expression occur. In such cases it may be unnecessary to use a DHFR inhibitor such as MTX: simply synthesizing enough HT for cell survival may provide a sufficiently stringent selection if expression of the DHFR is attenuated.

[0215] In embodiments where doubly auxotrophic cells cannot express enough glutamine synthetase or dihydrofolate reductase to survive unless they are grown in media supplemented with glutamine, hypoxanthine and thymidine (HT), glutamine synthetase and dihydrofolate reductase genes may be provided on separate polynucleotides. For example, a first gene transfer polynucleotide comprising a first gene expressible in the cell and a glutamine synthetase gene expressible in the cell, and a second gene transfer polynucleotide comprising a second gene expressible in the cell and a dihydrofolate reductase gene expressible in the cell, may be introduced into the doubly auxotrophic cell. Optionally the first gene transfer polynucleotide and the second gene transfer polynucleotide are both transposons such that the expressible gene and the selectable marker are both transposed by a corresponding transposase. The transposons may be transposable by the same transposase or by different transposases. The transposons may be introduced into the cell at the same time or at different times. Following introduction of the first gene transfer polynucleotide comprising a first gene expressible in the cell and a glutamine synthetase gene, glutamine is removed from the media, and optionally methionine sulphoximine is added to the media thereby selecting for cells in which the first gene transfer polynucleotide has integrated into the genome. Following introduction of the second gene transfer polynucleotide comprising a second gene expressible in the cell and a dihydrofolate reductase gene expressible in the cell, hypoxanthine and thymidine are removed from the media and optionally methotrexate is added thereby selecting for cells in which the second gene transfer polynucleotide has integrated into the genome. Optionally expression of glutamine synthetase in the doubly auxotrophic cell is inhibited by a multihairpin amiRNA. Optionally expression of dihydrofolate reductase in the doubly auxotrophic cell is inhibited by a multihairpin amiRNA.

### 5.10 Target Combinations

[0216] It may be advantageous to inhibit the expression of multiple genes endogenous to a cultured mammalian cell simultaneously. This may be done by combining guide strand sequences targeting different mRNAs with the appropriate loops and passenger strand sequences to form hairpins, preferably stabilized with hairpin-stabilizing sequences to the 5′ and 3′ of the guide-loop-passenger strand sequence as described in Section 5.2.4. Any number of genes may be targeted by an inhibitory polynucleotide, and multiple inhibitory polynucleotides may be integrated into the genome of a cultured mammalian cell.

### 5.11 Kits

[0217] The present invention also features kits comprising a transposase as a protein or encoded by a nucleic acid, and/or a transposon; or a gene transfer system as described herein comprising a transposase as a protein or encoded by a nucleic acid as described herein, in combination with a transposon; optionally together with a pharmaceutically acceptable carrier, adjuvant or vehicle, and optionally with instructions for use. Any of the components of the inventive kit may be administered and/or transfected into cells in a subsequent order or in parallel, e.g. a transposase protein or its encoding nucleic acid may be administered and/or transfected into a cell as defined above prior to, simultaneously with or subsequent to administration and/or transfection of a transposon. Alternatively, a transposon may be transfected into a cell as defined above prior to, simultaneously with or subsequent to transfection of a transposase protein or its encoding nucleic acid. If transfected in parallel, preferably both components are provided in a separated formulation and/or mixed with each other directly prior to administration to avoid transposition prior to transfection. Additionally, administration and/or transfection of at least one component of the kit may occur in a time staggered mode, e.g. by administering multiple doses of this component.

### 6. EXAMPLES

[0218] The following examples illustrate the methods, compositions and kits disclosed herein and should not be construed as limiting in any way. Various equivalents will be apparent from the following examples: such equivalents are also contemplated to be part of the invention disclosed herein.

### 6.1 Reducing Fucosylation of Secreted Proteins

### 6.1.1 Micro RNA Reduction of Antibody Fucosylation

### 6.1.1.1 Elimination of Fucosylation of a Stably Expressed Antibody

[0219] We used multi-hairpin amiRNA genes to suppress fucosylation of an antibody. The antibody had mature light chain sequence given by SEQ ID NO: 286 and mature heavy chain sequence given by SEQ ID NO: 285, the genes encoding the antibody were integrated into the genome of a CHO cell line on a transposon which further comprised a left end comprising a 5′-TTAA-3′ target sequence immediately followed by an ITR with SEQ ID NO: 423 (which is an embodiment of SEQ ID NO: 421) and additional sequence with SEQ ID NO: 417 and a right end comprising SEQ ID NO: 419 immediately followed by an ITR with SEQ ID NO: 424 (which is an embodiment of SEQ ID NO: 422) immediately followed by a 5′-TTAA-3′ target sequence. The transposon further comprised a gene encoding a glutamine synthetase selectable marker.

[0220] Three different multi-hairpin amiRNA genes targeting Cricetulus griseus alpha-(1,6)-fucosyl transferase (FUT8) mRNA, (which has nucleotide sequence SEQ ID NO: 1) were constructed. Two multi-hairpin amiRNAs, with nucleotide sequences SEQ ID NO: 193 and 194, each comprised three hairpins; the first hairpin comprised guide strand sequence SEQ ID NO: 23, immediately followed by loop sequence SEQ ID NO: 241 and passenger strand sequence SEQ ID NO: 108, the second hairpin comprised guide strand sequence SEQ ID NO: 24, immediately followed by loop sequence SEQ ID NO: 241 and passenger strand sequence SEQ ID NO: 109, the third hairpin comprised guide strand sequence SEQ ID NO: 25, immediately followed by loop sequence SEQ ID NO: 241 and passenger strand sequence SEQ ID NO: 110. Each of these three guide strand sequences was a 22 base sequence that was an exact reverse complement of a different region within the Cricetulus griseus alpha-(1,6)-fucosyl transferase (FUT8) mRNA. Each passenger strand sequence was complementary to its corresponding guide strand sequence, except that the bases in the passenger strand sequences corresponding to the 5′ base of the guide strand and the twelfth base of the guide strand were changed to be non-complementary. The first and twelfth bases of guide strand with SEQ ID NO:23 are G and C respectively, the corresponding bases in the corresponding passenger strand sequence SEQ ID NO: 108 are A and A respectively. The first and twelfth bases of guide strand with SEQ ID NO: 24 are T and A respectively, the corresponding bases in the corresponding passenger strand sequence SEQ ID NO: 109 are C and C respectively. The first and twelfth bases of guide strand with SEQ ID NO: 25 are T and G respectively, the corresponding bases in the corresponding passenger strand sequence SEQ ID NO: 110 are C and A respectively. Each hairpin in multi-hairpin amiRNA sequences SEQ ID NOs: 193 and 194 further comprised additional stem-stabilizing sequences, with stem sequence SEQ ID NO: 255 immediately preceding the guide strand sequence, and stem sequence SEQ ID NO: 256 immediately following the passenger strand sequence. Multi-hairpin amiRNA sequences SEQ ID NOs: 193 and 194 further comprised an unstructured sequence with SEQ ID NO: 251 to the 5′ of the first hairpin, and an unstructured sequence with SEQ ID NO: 253 to the 3′ of the third hairpin. Multi-hairpin amiRNA sequences SEQ ID NO: 194 further comprised an unstructured sequence with SEQ ID NO: 272 between the first and second hairpins, and an unstructured sequence with SEQ ID NO: 273 between the second and third hairpins. Each guide strand sequence is different, and each is complementary to the mRNA for Cricetulus griseus FUT8 (SEQ ID NO: 1).

[0221] The third multi-hairpin amiRNA with sequence given by SEQ ID NO: 195 also comprised three hairpins; the first hairpin comprised guide strand sequence SEQ ID NO: 26, immediately followed by loop sequence SEQ ID NO: 243 and passenger strand sequence SEQ ID NO: 111, the second hairpin comprised guide strand sequence SEQ ID NO: 27, immediately followed by loop sequence SEQ ID NO: 243 and passenger strand sequence SEQ ID NO: 112, the third hairpin comprised guide strand sequence SEQ ID NO: 28, immediately followed by loop sequence SEQ ID NO: 243 and passenger strand sequence SEQ ID NO: 113. Each of these three guide strand sequences was a 21 base sequence that was an exact reverse complement of a different region within the Cricetulus griseus alpha-(1,6)-fucosyl transferase (FUT8) mRNA. Each passenger strand sequence was complementary to its corresponding guide strand sequence, except that the bases in the passenger strand sequences corresponding to the twelfth and thirteenth bases of the guide strand were deleted. Each hairpin in multi-hairpin amiRNA sequences SEQ ID NO: 195 further comprised additional stem-stabilizing sequences, with stem sequence SEQ ID NO: 257 immediately preceding the guide strand sequence, and stem sequence SEQ ID NO: 258 immediately following the passenger strand sequence. Multi-hairpin amiRNA sequence SEQ ID NO: 195 further comprised an unstructured sequence with SEQ ID NO: 252 to the 5′ of the first hairpin, and an unstructured sequence with SEQ ID NO: 254 to the 3′ of the third hairpin. Each guide strand sequence is different, and each is complementary to the mRNA for Cricetulus griseus FUT8 (SEQ ID NO: 1).

[0222] Each of the three multi-hairpin amiRNA sequences was placed to the 3′ of an open reading frame encoding a red fluorescent protein (with nucleotide sequence SEQ ID NO: 279) and followed by a rabbit globin polyadenylation sequence. Each multi-hairpin amiRNA sequence was cloned into a transposon vector in which it was operably linked to a Pol II promoter (either the CMV promoter (with nucleotide sequence SEQ ID NO: 343) or the EF1 promoter (with nucleotide sequence SEQ ID NO: 314), as shown in Table 1). The transposon comprised a left end comprising a 5′-TTAA-3′ target sequence immediately adjacent to ITR with nucleotide sequence SEQ ID NO: 427, immediately followed by an additional nucleotide sequence SEQ ID NO: 425 and a right end comprising nucleotide sequence SEQ ID NO: 426 immediately followed by an ITR with nucleotide sequence SEQ ID NO: 428 immediately followed by a 5′-TTAA-3′ target sequence. It further comprised a gene encoding a puromycin selectable marker (with polypeptide sequence SEQ ID NO: 302). The transposons were configured so that the multi-hairpin amiRNA, the fluorescent protein gene, as well as all necessary operably linked control elements were transposable by a corresponding transposase.

[0223] Transposons were co-transfected with mRNA encoding transposase with polypeptide sequence SEQ ID NO: 502 into a clonal CHO cell line expressing an antibody with mature light chain polypeptide sequence SEQ ID NO: 286 and mature heavy chain polypeptide sequence SEQ ID NO: 285. The pool of transfected cells were grown in the presence of 10 μg/ml puromycin until their viability reached 95%. They were then grown in a 14 day fed-batch using Sigma Advanced Fed Batch media. Protein was purified from the culture supernatant using protein A affinity chromatography, reduced with dithiothreitol, and analyzed on an Agilent QTOF mass spectrometer. The mass spectroscopy traces are shown in FIGS. 3A-G. Table 1 shows the varying transposon components used for each trace shown in FIGS. 3A-G.

[0224] Four mass spectroscopy peaks are identified by arrows in FIGS. 3A-G: (i) at 50,424 Da is the heavy chain modified by G₀: the conserved hepta-saccharide core composed of 2 N-acetylglucosamine, 3 mannose and 2 other N-acetylglucosamine residues that are β-1,2 linked to α-6 mannose and α-3 mannose, forming two arms; (ii) at 50,571 Da is the heavy chain modified by G_{0F}: the conserved heptasaccharide core plus a fucose residue; (iii) at 50,586 Da is the heavy chain modified by G₁: the conserved heptasaccharide core plus a galactose residue and (iv) at 50,733 Da is the heavy chain modified by G_{1F}: the conserved heptasaccharide core plus a galactose residue and a fucose residue. FIG. 3A shows that in the starting clonal CHO line, there is a small G₀ peak at 50,424 Da and a much larger G_{0F} peak at 50,571, showing that the majority of the antibody is fucosylated (approximately 80% using relative peak height or integration under the curves). Similarly, for the starting clonal CHO line there is a significant G1F peak at 50,733. FIGS. 3B-G all show a much larger G₀ peak at 50,424 Da, and no detectable G_{0F} peak at 50,571, nor any detectable G1F peak at 50,733. We conclude that all three multi-hairpin amiRNA configurations, with the hairpins operably linked to a PolII promoter active in mammalian cells (either a CMV promoter or an EF1 promoter), inhibited FUT8 expression sufficiently to completely suppress antibody fucosylation.

### 6.1.1.2 Multi-Hairpin amiRNAs Operably Linked to Different Pol II Promoters

[0225] We used multi-hairpin amiRNA genes to suppress fucosylation of an antibody with mature light chain polypeptide sequence SEQ ID NO: 286 and mature heavy chain polypeptide sequence given by SEQ ID NO: 285, where the antibody was stably expressed from the clonal CHO cell line as described in Section 6.1.1.1.

[0226] The multi-hairpin amiRNA with nucleotide sequence SEQ ID NO: 194 comprised three hairpins with guides complementary to the mRNA for Cricetulus griseus alpha-(1,6)-fucosyl transferase (FUT8), as described in Section 6.1.1.1. The multi-hairpin amiRNA sequence was placed to the 3′ of an open reading frame encoding a red fluorescent protein (with nucleotide sequence SEQ ID NO: 279) and followed by a rabbit globin polyadenylation sequence. The multi-hairpin amiRNA gene was cloned into three different Bombyx transposon vectors in each of which it was operably linked to a different Pol II promoter that was weaker than the strong EF1 and CMV promoters used in Section 6.1.1.1: a rat EEF2 promoter (with nucleotide sequence SEQ ID NO: 350), a PGK promoter (with nucleotide sequence SEQ ID NO: 386) and a Ubb promoter (with nucleotide sequence SEQ ID NO:392). The transposon comprised a left end comprising a 5′-TTAA-3′ target sequence immediately adjacent to an ITR with nucleotide sequence SEQ ID NO: 427 immediately followed by additional nucleotide sequence SEQ ID NO: 425 and a right end comprising nucleotide sequence SEQ ID NO: 426 immediately followed by an ITR with nucleotide sequence SEQ ID NO: 428 immediately followed by a 5′-TTAA-3′ target sequence. It further comprised an open reading frame encoding puromycin selectable marker with polypeptide sequence given by SEQ ID NO: 302. The transposons were configured so that the multi-hairpin amiRNA, the fluorescent protein gene and the selectable marker gene, as well as all necessary operably linked control elements were transposable by a corresponding transposase.

[0227] Transposons were co-transfected with mRNA encoding transposase with polypeptide sequence SEQ ID NO: 502 into a clonal CHO cell line expressing an antibody with mature light chain polypeptide sequence SEQ ID NO: 286 and mature heavy chain polypeptide sequence SEQ ID NO: 285. The pool of transfected cells were grown in the presence of 10 μg/ml puromycin until their viability reached 95%. They were then grown in a 14 day fed-batch using Sigma Advanced Fed Batch media. Protein was purified from the culture supernatant using protein A affinity chromatography, reduced with dithiothreitol, and analyzed on an Agilent QTOF mass spectrometer. The mass spectroscopy traces are shown in FIGS. 4A-D.

[0228] Three mass spectroscopy peaks are identified by arrows in FIGS. 4A-D: (i) at 50,424 Da is the heavy chain modified by G₀: the conserved heptasaccharide core composed of 2 N-acetylglucosamine, 3 mannose and 2 other N-acetylglucosamine residues that are β-1,2 linked to α-6 mannose and α-3 mannose, forming two arms; (ii) at 50,570 Da is the heavy chain modified by G_{0F}: the conserved heptasaccharide core plus a fucose residue; (iii) at 23,443 Da is the light chain. FIG. 4A shows that in the starting clonal CHO line, the heavy chain is present primarily as a single G_{0F} peak at 50,570, showing that the majority of the antibody is fucosylated (approximately 85% using relative peak height or integration under the curves). FIGS. 4B-D all show a single G₀ peak at 50,424 Da, and no detectable G_{0F} peak at 50,570. We conclude that all three of these Pol II promoters, an EEF2 promoter, a PGK promoter or a ubiquitin promoter are capable of driving enough amiRNA expression from a multi-hairpin amiRNA to inhibit FUT8 expression sufficiently to completely suppress antibody fucosylation.

### 6.1.1.3 Modification of a CHO Cell Line to Act as a Host for Transient Production of Afucosylated Antibodies

[0229] We used multi-hairpin amiRNA genes to suppress FUT 8 expression in a pool of CHO cells. The cells were subsequently used to express antibodies, which were tested for fucosylation.

[0230] The multi-hairpin amiRNA with nucleotide sequence SEQ ID NO: 194 comprised three hairpins with guides complementary to the mRNA for Cricetulus griseus alpha-(1,6)-fucosyl transferase (FUT8), as described in Section 6.1.1.1. The multi-hairpin amiRNA sequence was placed to the 3′ of an open reading frame encoding a red fluorescent protein (with nucleotide sequence SEQ ID NO: 279) and followed by a rabbit globin polyadenylation sequence. The multi-hairpin amiRNA gene was cloned into a Bombyx transposon vector in which it was operably linked to an EF1 promoter (with nucleotide sequence SEQ ID NO: 314). The transposon comprised a left end comprising a 5′-TTAA-3′ target sequence immediately adjacent to an ITR with nucleotide sequence SEQ ID NO: 427 immediately followed by additional nucleotide sequence SEQ ID NO: 425 and a right end comprising nucleotide sequence SEQ ID NO: 426 immediately followed by an ITR with nucleotide sequence SEQ ID NO: 428 immediately followed by a 5′-TTAA-3′ target sequence. It further comprised an open reading frame encoding puromycin selectable marker with polypeptide sequence SEQ ID NO: 302. The transposons were configured so that the multi-hairpin amiRNA, the fluorescent protein gene and the selectable marker gene, as well as all necessary operably linked control elements were transposable by a corresponding transposase.

[0231] Transposons were co-transfected with mRNA encoding transposase with polypeptide sequence SEQ ID NO: 502 into a CHO cell line expressing no heterologous antibody sequences. The pool of transfected cells were grown in the presence of 10 μg/ml puromycin until their viability reached 95%. The pool of cells was then transfected with genes encoding an antibody with mature light chain polypeptide sequence SEQ ID NO: 286 and mature heavy chain polypeptide sequence SEQ ID NO: 287. The parental CHO line containing no amiRNA was also transfected with these antibody-encoding plasmids a control. Transfected cell pools were grown in a 7-day transient culture using ThermoFisher ExpiCHO media. Protein was purified from the culture supernatant using protein A affinity chromatography, reduced with dithiothreitol, and analyzed on an Agilent QTOF mass spectrometer. The mass spectroscopy traces are shown in FIGS. 5A-B.

[0232] Three mass spectroscopy peaks are identified by arrows in FIGS. 5A-B: (i) at 50,521 Da is the heavy chain modified by G₀: the conserved heptasaccharide core composed of 2 N-acetylglucosamine, 3 mannose and 2 other N-acetylglucosamine residues that are β-1,2 linked to α-6 mannose and α-3 mannose, forming two arms; (ii) at 50,668 Da is the heavy chain modified by G_{0F}: the conserved heptasaccharide core plus a fucose residue; (iii) at 23,444 Da is the light chain. FIG. 5A shows that in antibodies produced by the parental CHO line, the heavy chain is present primarily as a single G_{0F} peak at 50,668, with no detectable afucosylated heavy chain. FIG. 5B shows when the same antibody is produced from the pool of cells whose genomes comprise the multi-hairpin amiRNA gene, there is a single heavy chain G₀ peak at 50,521 Da, and no detectable G_{0F} peak at 50,668. We conclude that stable integration of a multi-hairpin amiRNA gene, comprising nucleotide sequence SEQ ID NO: 194 operably linked to a PolII promoter, into the CHO genome resulted in a pool of cells in which FUT8 expression was reduced to such a level that they produced only afucosylated antibodies.

### 6.1.1.4 Elimination of Fucosylation of a Stably Expressed Antibody Using a Multi-Hairpin amiRNA Gene Directed Against Multiple Different Genes

[0233] Fucosylation occurs within the Golgi apparatus. As an alternative to inhibiting fucosyl transferase, fucosylation of secreted antibodies could in principle be prevented by blocking cellular synthesis of fucose. GDP-mannose 4,6-dehydratase (GMD) is a key enzyme in fucose synthesis, and thus a potential target for RNA interference. However, there is also a fucose salvage pathway which could circumvent blockade at the GMD step. This can in turn be inhibited by preventing uptake of fucose into the Golgi by inhibiting the GDP-fucose transporter 1 (GFT).

[0234] A multi-hairpin amiRNA gene was designed to target both Cricetulus griseus GDP-Mannose 4,6-dehydratase (GMD), and GDP-fucose transporter 1 (GFT). The multi-hairpin amiRNA, with nucleotide sequence SEQ ID NO: 200, comprised four hairpins; the first hairpin comprised guide strand sequence SEQ ID NO: 35 (complementary to the mRNA for GMD, with nucleotide sequence SEQ ID NO: 3), immediately followed by loop sequence SEQ ID NO: 241 and passenger strand sequence SEQ ID NO: 120; the second hairpin comprised guide strand sequence SEQ ID NO: 41 (complementary to the mRNA for GFT, with nucleotide sequence SEQ ID NO: 5), immediately followed by loop sequence SEQ ID NO: 241 and passenger strand sequence SEQ ID NO: 126; the third hairpin comprised guide strand sequence SEQ ID NO:36 (complementary to the mRNA for GMD, with nucleotide sequence SEQ ID NO: 3), immediately followed by loop sequence SEQ ID NO: 241 and passenger strand sequence SEQ ID NO: 121 and the fourth hairpin comprised guide strand sequence SEQ ID NO: 42 (complementary to the mRNA for GFT, with nucleotide sequence SEQ ID NO: 5), immediately followed by loop sequence SEQ ID NO: 241 and passenger strand sequence SEQ ID NO: 127. Each passenger strand sequence was complementary to its corresponding guide strand sequence, except that the bases in the passenger strand sequences corresponding to the 5′ base of the guide strand and the twelfth base of the guide strand were changed to be non-complementary. The first and twelfth bases of guide strand with SEQ ID NO: 35 are T and G respectively, the corresponding bases in the corresponding passenger strand sequence SEQ ID NO: 120 are C and A respectively. The first and twelfth bases of guide strand with SEQ ID NO: 41 are T and C respectively, the corresponding bases in the corresponding passenger strand sequence SEQ ID NO: 126 are C and A respectively. The first and twelfth bases of guide strand with SEQ ID NO: 36 are T and T respectively, the corresponding bases in the corresponding passenger strand sequence SEQ ID NO: 121 are C and C respectively. The first and twelfth bases of guide strand with SEQ ID NO: 42 are T and G respectively, the corresponding bases in the corresponding passenger strand sequence SEQ ID NO: 127 are C and A respectively. Each hairpin in the multi-hairpin amiRNA with nucleotide sequence SEQ ID NO: 200 further comprised additional stem-stabilizing sequences, with stem sequence SEQ ID NO: 255 immediately preceding the guide strand sequence, and stem sequence SEQ ID NO: 256 immediately following the passenger strand sequence. Multi-hairpin amiRNA sequences SEQ ID NO: 200 further comprised an unstructured sequence with SEQ ID NO: 251 to the 5′ of the first hairpin, and an unstructured sequence with SEQ ID NO: 253 to the 3′ of the fourth hairpin. Multi-hairpin amiRNA sequences SEQ ID NO: 200 further comprised an unstructured sequence with SEQ ID NO: 272 between the first and second hairpins, and an unstructured sequence with SEQ ID NO: 273 between the second and third hairpins, and an unstructured sequence with SEQ ID NO: 274 between the third and fourth hairpins. Multi-hairpin amiRNA SEQ ID NO: 200 thus comprises two guide strand sequences complementary to Cricetulus griseus GMD mRNA, and two guide strand sequences complementary to Cricetulus griseus GFT mRNA, wherein each guide strand sequence is different.

[0235] Multi-hairpin amiRNA sequence with SEQ ID NO: 200 was placed to the 3′ of an open reading frame encoding a red fluorescent protein (with nucleotide sequence SEQ ID NO: 279) and followed by a rabbit globin polyadenylation sequence. The multi-hairpin amiRNA was then cloned into a transposon vector in which it was operably linked to a Pol II promoter (the human CMV promoter). The transposon comprised a left end comprising a 5′-TTAA-3′ target sequence immediately adjacent to ITR with nucleotide sequence SEQ ID NO: 427, immediately followed by an additional nucleotide sequence SEQ ID NO: 425 and a right end comprising nucleotide sequence SEQ ID NO: 426 immediately followed by an ITR with nucleotide sequence SEQ ID NO: 428 immediately followed by a 5′-TTAA-3′ target sequence. It further comprised a gene encoding a puromycin selectable marker (with polypeptide sequence SEQ ID NO: 302). The transposons were configured so that the multi-hairpin amiRNA, the fluorescent protein gene, as well as all necessary operably linked control elements were transposable by a corresponding transposase.

[0236] Transposons were co-transfected with mRNA encoding transposase with polypeptide sequence SEQ ID NO: 502 into a clonal CHO cell line expressing an antibody with mature light chain polypeptide sequence SEQ ID NO: 286 and mature heavy chain polypeptide sequence SEQ ID NO: 285. The pool of transfected cells were grown in the presence of 10 μg/ml puromycin until their viability reached 95%. They were then grown in a 14 day fed-batch using Sigma Advanced Fed Batch media. Protein was purified from the culture supernatant using protein A affinity chromatography, reduced with dithiothreitol, and analyzed on an Agilent QTOF mass spectrometer. Table 2 shows the percentage of the antibody heavy chain that was modified by G₀ (the conserved heptasaccharide core composed of 2 N-acetylglucosamine, 3 mannose and 2 other N-acetylglucosamine residues that are β-1,2 linked to α-6 mannose and α-3 mannose, forming two arms) or G₁ (the conserved heptasaccharide core plus a galactose residue), compared with the percentage of the antibody heavy chain that was modified by G_{0F} or G1F: G₀ and G₁ with the addition of a fucose residue.

[0237] As shown in Table 2, antibody expressed from the control cell line which had not been transfected with a multi-hairpin amiRNA had a fucosylation level of about 75%. In contrast, no fucose was detectable by mass spectroscopy in the pool of cells whose genomes comprised multi-hairpin amiRNA with SEQ ID NO: 200. We conclude that both of these multi-hairpin amiRNAs completely suppressed antibody fucosylation. We conclude that stable integration of a multi-hairpin amiRNA gene, comprising SEQ ID NO: 200 operably linked to a PolII promoter, into the CHO genome resulted in a pool of cells in which GMD and GFT expression were reduced to such a level that they produced only afucosylated antibodies.

### 6.1.1.5 Modification of a Human Cell Line to Act as a Host for Transient Production of Afucosylated Antibodies

[0238] Two different multi-hairpin amiRNA sequences were designed to target genes involved in the fucosylation pathway in human cells: alpha-(1,6)-fucosyl transferase (FUT8), GDP-Mannose 4,6-dehydratase (GMD), and GDP-fucose transporter 1 (GFT). One Multi-hairpin amiRNA, with nucleotide sequence SEQ ID NO: 202 comprised three hairpins; the first hairpin comprised guide strand sequence SEQ ID NO: 29, immediately followed by loop sequence SEQ ID NO: 241 and passenger strand sequence SEQ ID NO: 114, the second hairpin comprised guide strand sequence SEQ ID NO: 30, immediately followed by loop sequence SEQ ID NO: 241 and passenger strand sequence SEQ ID NO: 115, the third hairpin comprised guide strand sequence SEQ ID NO: 31, immediately followed by loop sequence SEQ ID NO: 241 and passenger strand sequence SEQ ID NO: 116. Each of these three guide strand sequences was a 22 base sequence that was an exact reverse complement of a different region within the Homo sapiens alpha-(1,6)-fucosyl transferase (FUT8) mRNA. Each passenger strand sequence was complementary to its corresponding guide strand sequence, except that the bases in the passenger strand sequences corresponding to the 5′ base of the guide strand and the twelfth base of the guide strand were changed to be non-complementary. The first and twelfth bases of guide strand with SEQ ID NO: 29 are T and T respectively, the corresponding bases in the corresponding passenger strand sequence SEQ ID NO: 114 are C and C respectively. The first and twelfth bases of guide strand with SEQ ID NO: 30 are T and T respectively, the corresponding bases in the corresponding passenger strand sequence SEQ ID NO: 115 are C and C respectively. The first and twelfth bases of guide strand with SEQ ID NO: 31 are T and A respectively, the corresponding bases in the corresponding passenger strand sequence SEQ ID NO: 116 are C and C respectively. Each hairpin in multi-hairpin amiRNA nucleotide sequence SEQ ID NO: 202 further comprised additional stem-stabilizing sequences, with stem sequence SEQ ID NO: 255 immediately preceding the guide strand sequence, and stem sequence SEQ ID NO: 256 immediately following the passenger strand sequence. Multi-hairpin amiRNA nucleotide sequence SEQ ID NO: 202 further comprised an unstructured sequence with SEQ ID NO: 251 to the 5′ of the first hairpin, and an unstructured sequence with SEQ ID NO: 253 to the 3′ of the third hairpin. Multi-hairpin amiRNA nucleotide sequence SEQ ID NO: 202 further comprised an unstructured sequence with SEQ ID NO: 272 between the first and second hairpins, and an unstructured sequence with SEQ ID NO: 273 between the second and third hairpins. Each guide strand sequence is different, and each is complementary to the mRNA for Homo sapiens FUT8 (SEQ ID NO: 7).

[0239] A second multi-hairpin amiRNA gene was designed to target both Homo sapiens GDP-Mannose 4,6-dehydratase (GMD) with mRNA sequence given by SEQ ID NO: 8, and GDP-fucose transporter 1 (GFT) with mRNA sequence given by SEQ ID NO: 9. The multi-hairpin amiRNA, with nucleotide sequence SEQ ID NO: 204, comprised four hairpins; the first hairpin comprised guide strand sequence SEQ ID NO: 47 (complementary to the mRNA for human GMD, with sequence SEQ ID NO: 8), immediately followed by loop sequence SEQ ID NO: 241 and passenger strand sequence SEQ ID NO: 132; the second hairpin comprised guide strand sequence SEQ ID NO: 52 (complementary to the mRNA for human GFT, with sequence given by SEQ ID NO: 9), immediately followed by loop sequence SEQ ID NO: 241 and passenger strand sequence SEQ ID NO: 137; the third hairpin comprised guide strand sequence SEQ ID NO: 50 (complementary to the mRNA for human GFT, with sequence SEQ ID NO: 9), immediately followed by loop sequence SEQ ID NO: 241 and passenger strand sequence SEQ ID NO: 135 and the fourth hairpin comprised guide strand sequence SEQ ID NO: 49 (complementary to the mRNA for human GMD, with sequence given by SEQ ID NO: 8), immediately followed by loop sequence SEQ ID NO: 241 and passenger strand sequence SEQ ID NO: 134. Each passenger strand sequence was complementary to its corresponding guide strand sequence, except that the bases in the passenger strand sequences corresponding to the 5′ base of the guide strand and the twelfth base of the guide strand were changed to be non-complementary. The first and twelfth bases of guide strand with SEQ ID NO: 47 are T and G respectively, the corresponding bases in the corresponding passenger strand sequence SEQ ID NO: 132 are C and A respectively. The first and twelfth bases of guide strand with SEQ ID NO: 52 are T and A respectively, the corresponding bases in the corresponding passenger strand sequence SEQ ID NO: 137 are C and C respectively. The first and twelfth bases of guide strand with SEQ ID NO: 50 are T and G respectively, the corresponding bases in the corresponding passenger strand sequence SEQ ID NO: 135 are C and A respectively. The first and twelfth bases of guide strand with SEQ ID NO: 49 are T and C respectively, the corresponding bases in the corresponding passenger strand sequence SEQ ID NO: 134 are C and A respectively. Each hairpin in multi-hairpin amiRNA sequence SEQ ID NO: 204 further comprised additional stem-stabilizing sequences, with stem sequence SEQ ID NO: 255 immediately preceding the guide strand sequence, and stem sequence SEQ ID NO: 256 immediately following the passenger strand sequence. Multi-hairpin amiRNA sequence SEQ ID NO: 204 further comprised an unstructured sequence with SEQ ID NO: 251 to the 5′ of the first hairpin, and an unstructured sequence with SEQ ID NO: 253 to the 3′ of the fourth hairpin. Multi-hairpin amiRNA sequences SEQ ID NO: 200 further comprised an unstructured sequence with SEQ ID NO: 272 between the first and second hairpins, and an unstructured sequence with SEQ ID NO: 273 between the second and third hairpins, and an unstructured sequence with SEQ ID NO: 274 between the third and fourth hairpins. Multi-hairpin amiRNA SEQ ID NO: 204 thus comprises two guide strand sequences complementary to Homo sapiens GMD mRNA, and two guide strand sequences complementary to Homo sapiens GFT mRNA, wherein each guide strand sequence is different.

[0240] The multi-hairpin amiRNA sequences were placed to the 3′ of an open reading frame encoding a red fluorescent protein (with nucleotide sequence SEQ ID NO: 279) and followed by a rabbit globin polyadenylation sequence. Each multi-hairpin amiRNA sequence was cloned into a transposon vector in which it was operably linked to a Pol II promoter (the CMV promoter with nucleotide sequence SEQ ID NO: 343). The transposon comprised a left end comprising a 5′-TTAA-3′ target sequence immediately adjacent to ITR with nucleotide sequence SEQ ID NO: 427, immediately followed by an additional nucleotide sequence SEQ ID NO: 425 and a right end comprising nucleotide sequence SEQ ID NO: 426 immediately followed by an ITR with nucleotide sequence SEQ ID NO: 428 immediately followed by a 5′-TTAA-3′ target sequence. It further comprised a gene encoding a puromycin selectable marker (with polypeptide sequence SEQ ID NO: 302). The transposons were configured so that the multi-hairpin amiRNA, the fluorescent protein gene, as well as all necessary operably linked control elements were transposable by a corresponding transposase.

[0241] Transposons were co-transfected with mRNA encoding transposase with polypeptide sequence SEQ ID NO: 502 into a human embryonic kidney (HEK) cell line expressing no heterologous antibody sequences. The pool of transfected cells were grown in the presence of 10 μg/ml puromycin until their viability reached 95%. Each pool of cells was then transfected in two independent reactions with genes encoding an antibody with mature light chain polypeptide sequence SEQ ID NO: 286 and mature heavy chain polypeptide sequence SEQ ID NO: 287. The antibody genes were operably linked to a human CMV promoter and a rabbit globin polyadenylation signal sequence. Transfected cell pools were grown in a 7-day transient culture using ThermoFisher Expi293 media. Protein was purified from the culture supernatant using protein A affinity chromatography, reduced with dithiothreitol, and analyzed on an Agilent QTOF mass spectrometer. Peaks were identified and quantified corresponding to (i) the heavy chain modified by G₀: the conserved heptasaccharide core composed of 2 N-acetylglucosamine, 3 mannose and 2 other N-acetylglucosamine residues that are β-1,2 linked to α-6 mannose and α-3 mannose, forming two arms, (ii) the heavy chain modified by G₀ plus fucose (G_{0F}), (iii) the heavy chain modified by G₀ plus an additional galactose residue (G₁), and (iv) the heavy chain modified by G₀ plus an additional galactose residue plus fucose (G1F). Table 3 shows the titer of antibody produced by the transfected HEK cell pools, and the fucosylation observed in each case.

[0242] In the absence of multi-hairpin amiRNAs, the antibody produced by HEK cells was between 93 and 100% fucosylated (Table 3 rows 1 and 2). Both replicates of cell pools whose genomes comprised the anti-GMD/GFT multi-hairpin amiRNA genes with nucleotide sequence SEQ ID NO: 204 (Table 3 rows 5 and 6) showed complete abolition of antibody fucosylation. Both replicates of cell pools whose genomes comprised the anti-FUT8 multi-hairpin amiRNA nucleotide sequence SEQ ID NO: 202 (Table 3 rows 3 and 4) showed approximately 90% reduction of antibody fucosylation. We conclude that stable integration of multi-hairpin amiRNA genes comprising nucleotide sequence SEQ ID NO: 202 or 204 into the HEK genome inhibit expression of genes in the fucosylation pathway such that the resulting pool of cells produce largely or entirely afucosylated antibodies.

[0243] One of the pools of HEK cells whose genomes comprised the anti-FUT8 multi-hairpin amiRNA with nucleotide sequence SEQ ID NO: 202 was subjected to single cell cloning. Four monoclonal cell lines were produced. Each of these cell lines was transfected in two independent reactions with genes encoding an antibody with mature light chain polypeptide sequence SEQ ID NO: 286 and mature heavy chain polypeptide sequence SEQ ID NO: 287. The antibody genes were operably linked to a human CMV promoter and a rabbit globin polyadenylation signal sequence. Transfected cells were grown in a 7 day transient culture using ThermoFisher Expi293 media. Protein was purified from the culture supernatant using protein A affinity chromatography, reduced with dithiothreitol, and analyzed on an Agilent QTOF mass spectrometer for the presence of fucosylated antibody, as described above. Table 4 shows the fucosylation level of the antibodies prepared from the clones.

[0244] Cells whose genomes did not comprise multi-hairpin amiRNA genes produced antibody that was between 90 and 94% fucosylated (Table 4 rows 1 and 2). The four different clones produced antibodies with significantly different levels of fucosylation, though the level was very similar between replicates made in the same clonal cell line. Clonal cell line 1 produced antibodies that were about 40% fucosylated, antibodies from clonal line 2 were about 20% fucosylated, clonal line 3 produced antibodies about 13% fucosylated, and clonal line 4 produced antibodies with between 6 and 10% fucosylation. Inhibition of fucosylation was stably maintained in at least one of the four clonal lines.

[0245] A transposon comprising a multi-hairpin amiRNA gene comprising multiple guide strand sequences, each complementary to a different sequence within the human FUT8 mRNA (with nucleotide sequence SEQ ID NO: 7), can be integrated into the genome of an HEK293 cell to reduce the fucosylation of antibodies produced by the HEK cell. Preferably less than 40% of an antibody produced by the cell line is fucosylated, more preferably less than 20% of an antibody produced by the cell line is fucosylated, more preferably less than 10% of an antibody produced by the cell line is fucosylated.

### 6.1.2 Dual Functional Micro RNAs: Gene Knockdown and Selectable Marker Attenuation

### 6.1.2.1 Fucosylation-Targeting microRNAs Incorporated into the 3′ UTR of the Selectable Marker Gene

[0246] As described in Section 5.2.6, it can be advantageous to incorporate multi-hairpin amiRNA sequences into the 3′UTR of a selectable marker gene, particularly when the selectable marker is part of a transposon. After transcription, processing of the amiRNA sequences destabilizes the selectable marker mRNA because it leads to removal of the stabilizing polyA sequences. This means that to supply enough of the selectable marker protein encoded by the selectable marker gene, expression from the transposon will need to be higher than from a transposon without the amiRNA sequences in the selectable marker 3′UTR. Including amiRNA sequences in the 3′UTR of the selectable marker thus either selects for cells whose genomes comprise more copies of the transposon, or for cells in which transposons are integrated in more transcriptionally active regions of the genome. Another advantage is that only a very small addition to transposon size (less than an additional 1,000 bp) can effect a phenotypic change by inhibiting the expression of one or more host genes. For example, this can be done simultaneously with introduction of a gene encoding a protein to be expressed. To demonstrate this, amiRNA sequences were placed into the 3′UTR of a gene for expression of glutamine synthetase in a mammalian cell.

[0247] One- two- or three-hairpin amiRNAs were incorporated into the 3′ UTR of a glutamine synthetase selectable marker on a transposon. The multi-hairpin amiRNA with nucleotide sequence SEQ ID NO: 194 comprised three hairpins as described in Section 6.1.1.1.

[0248] The multi-hairpin amiRNA with nucleotide sequence SEQ ID NO: 196 comprised two hairpins, the first hairpin comprised guide strand sequence SEQ ID NO: 23, immediately followed by loop sequence SEQ ID NO: 241 and passenger strand sequence SEQ ID NO: 108, the second hairpin comprised guide strand sequence SEQ ID NO: 24, immediately followed by loop sequence SEQ ID NO: 241 and passenger strand sequence SEQ ID NO: 109. Each of these two guide strand sequences was a 22 base sequence that was an exact reverse complement of a different region within the Cricetulus griseus alpha-(1,6)-fucosyl transferase (FUT8) mRNA. Mismatches between guide and passenger strand sequences are as described in Section 6.1.1.1. Each hairpin in multi-hairpin amiRNA nucleotide sequence SEQ ID NO: 196 further comprised additional stem-stabilizing sequences, with stem sequence SEQ ID NO: 255 immediately preceding the guide strand sequence, and stem sequence SEQ ID NO: 256 immediately following the passenger strand sequence. Multi-hairpin amiRNA with nucleotide sequence SEQ ID NO: 196 further comprised an unstructured sequence with SEQ ID NO: 251 to the 5′ of the first hairpin, and an unstructured sequence with SEQ ID NO: 253 to the 3′ of the third hairpin. Multi-hairpin amiRNA nucleotide sequence SEQ ID NO: 196 further comprised an unstructured sequence with SEQ ID NO: 272 between the first and second hairpins. Each guide strand sequence is different, and each is complementary to the mRNA for Cricetulus griseus FUT8 (SEQ ID NO: 1).

[0249] We also designed and synthesized a single hairpin amiRNA with sequence given by SEQ ID NO: 197 comprising one hairpin which comprised guide strand sequence SEQ ID NO: 23, immediately followed by loop sequence SEQ ID NO: 241 and passenger strand sequence SEQ ID NO: 108. Mismatches between guide and passenger strand sequences are as described in Section 6.1.1.1. The hairpin in amiRNA sequence SEQ ID NOs: 197 further comprised additional stem-stabilizing sequences, with stem sequence SEQ ID NO: 255 immediately preceding the guide strand sequence, and stem sequence SEQ ID NO: 256 immediately following the passenger strand sequence. The amiRNA nucleotide sequence SEQ ID NO: 197 further comprised an unstructured sequence with SEQ ID NO: 251 to the 5′ of the hairpin, and an unstructured sequence with SEQ ID NO: 253 to the 3′ of the hairpin.

[0250] These amiRNA sequences were placed to the 3′ of an open reading frame encoding a glutamine synthetase protein (with polypeptide sequence SEQ ID NO: 307) and followed by a human globin polyadenylation sequence. The amiRNA genes were cloned into a transposon vector in which they were operably linked to a Pol II promoter. The transposon further comprised genes encoding an antibody with mature light chain polypeptide sequence SEQ ID NO: 286 and mature heavy chain polypeptide sequence SEQ ID NO: 288. The transposon further comprised a left end comprising a 5′-TTAA-3′ target sequence immediately followed by an ITR with nucleotide sequence SEQ ID NO: 423 (which is an embodiment of SEQ ID NO: 421) and additional nucleotide sequence SEQ ID NO: 417 and a right end comprising nucleotide sequence SEQ ID NO: 419 immediately followed by an ITR with nucleotide sequence SEQ ID NO: 424 (which is an embodiment of SEQ ID NO: 422) immediately followed by a 5′-TTAA-3′ target sequence. The transposon was configured so that the multi-hairpin amiRNA, the glutamine synthetase gene and the genes for both antibody chains, as well as all necessary operably linked control elements were transposable by a corresponding transposase.

[0251] Transposons were co-transfected with mRNA encoding transposase with polypeptide sequence SEQ ID NO: 472 into a CHO cell line with no functional glutamine synthetase gene. The pool of transfected cells were grown in the absence of glutamine added to the media until their viability reached 95%. They were then grown in a 14 day fed-batch using Sigma Advanced Fed Batch media. Protein was purified from the culture supernatant using protein A affinity chromatography, reduced with dithiothreitol, and analyzed on an Agilent QTOF mass spectrometer. We integrated the area under the peaks at 50,456 Da (corresponding to the heavy chain modified by G₀: the conserved heptasaccharide core composed of 2 N-acetylglucosamine, 3 mannose and 2 other N-acetylglucosamine residues that are β-1,2 linked to α-6 mannose and α-3 mannose, forming two arms) and 50,602 (corresponding to the heavy chain modified by G_{0F}: the conserved heptasaccharide core plus a fucose residue) to calculate the relative proportion of fucosylated and afucosylated antibody. Results are shown in Table 5.

[0252] Table 5 shows that when the strong CMV or EEF2 promoters are operably linked to the glutamine synthetase gene and to the multi-hairpin amiRNAs in its 3′ UTR, the antibody is fully afucosylated (Table 5 rows 1 and 2). This is in contrast to the approximately 80-85% fucosylation seen when an equivalent transposon in which there were no amiRNA sequences in the 3′UTR of the glutamine synthetase gene (as described in Sections 6.1.1.1 and 6.1.1.2). Because these promoters are strong, they express high levels of glutamine synthetase, which means that cells do not require many copies of the integrated transposon in order to synthesize enough glutamine to survive. The antibody titer in the culture supernatant is therefore lower: lowest (163 mg/L) in the case of the strongest (CMV) promoter (Table 5 column E), and higher (443 mg/L) with the weaker EEF2 promoter. The CMV and the EEF2 promoter, operably linked to multi-hairpin amiRNA with nucleotide sequence SEQ ID NO: 194 (by incorporating the amiRNA hairpins after the open reading frame encoding the selectable marker, but before the polyA signal sequence) completely eliminated fucosylation of the antibody (Table 5, columns F and G).

[0253] When a weaker promoter is operably linked to the glutamine synthetase, and the 3′UTR comprises only a single amiRNA hairpin (amiRNA with nucleotide sequence SEQ ID NO: 197, Table 5 row 3), the antibody titer is 514 mg/L: about 3-fold higher than when the CMV promoter is used, but the antibody is still about 50% fucosylated, compared with the natural level of around 80-85% as described in Sections 6.1.1.1 and 6.1.1.2. Adding a second amiRNA hairpin to the 3′ UTR of the glutamine synthetase (amiRNA with nucleotide sequence SEQ ID NO: 196) has the twin effects of increasing antibody titer (to 770 mg/L) and reducing antibody fucosylation (to 10%), as shown in Table 5 row 4. These effects result from more processing of the selectable marker 3′ UTR, which produces more FUT8-targeting RNA in the RISC complex and also increases destabilization of the glutamine synthetase selectable marker mRNA. This trend continues when the PGK promoter is operably linked to a glutamine synthetase gene with a three-hairpin amiRNA in its 3′ UTR (nucleotide sequence SEQ ID NO: 194), as shown in Table 5 row 5. The antibody titer is further increased to 835 mg/L, and fucosylation of the antibody is completely prevented.

[0254] This example also demonstrates the benefit of using multi-hairpin amiRNA sequences, wherein two or more different guide strand sequences are complementary to two or more different sequences in the same target mRNA. Use of a single hairpin amiRNA with one guide strand sequence complementary to FUT8 mRNA reduced FUT8 expression which resulted in reduction of antibody fucosylation from approximately 80% to 50%. Use of a multi-hairpin with two different guide strand sequences complementary to different sequences within the FUT8 mRNA reduced FUT8 expression more and resulted in reduction of antibody fucosylation to 10%. Use of a multi-hairpin with three different guide strand sequences complementary to different sequences within the FUT8 mRNA reduced FUT8 expression even more and resulted in reduction of antibody fucosylation to below the limit of detection.

### 6.1.2.2 Fucosylation-Targeting microRNAs Incorporated into the 3′ UTR of the Selectable Marker Gene and Driven by Different Promoters

[0255] As described in Section 6.1.2.1, the multi-hairpin amiRNA with nucleotide sequence SEQ ID NO: 194 was capable of completely suppressing the fucosylation of the antibody. However, we also wished to increase the titer of the antibody. As described in Section 5.2.6, attenuation of expression of the glutamine synthetase selectable marker can improve expression of genes encoded on a transposon. Transcription of the multi-hairpin amiRNA sequences from the PGK promoter as described in Section 6.1.2.1 provided enough guide strand associated with the RISC complex to reduce fucosylation through FUT8 below detectable levels. We therefore wished to attenuate glutamine synthetase expression in a way that would not reduce transcription of the multi-hairpin amiRNA. To do this we tested incorporation of inhibitory 5′ UTRs before the glutamine synthetase gene. These should reduce expression of the glutamine synthetase without affecting transcription of the multi-hairpin amiRNA. We also tested expressing glutamine synthetase and multi-hairpin amiRNA with nucleotide sequence SEQ ID NO: 194 by operably linking it to the weaker HSV-TK promoter in the presence of inhibitory 5′ UTRs.

[0256] The three-hairpin amiRNA with nucleotide sequence SEQ ID NO: 194 was incorporated into the 3′ UTR of a glutamine synthetase selectable marker on a transposon. The amiRNA sequence was placed to the 3′ of an open reading frame encoding a glutamine synthetase protein with polypeptide sequence SEQ ID NO: 307 and was followed by a human globin polyadenylation sequence. The amiRNA gene was cloned into different transposon vectors in which it was operably linked to different Pol II promoters. Each transposon further comprised genes encoding an antibody with mature light chain polypeptide sequence SEQ ID NO: 286 and mature heavy chain polypeptide sequence SEQ ID NO: 288. The transposon further comprised a left end comprising a 5′-TTAA-3′ target sequence immediately followed by an ITR with nucleotide sequence SEQ ID NO: 423 (which is an embodiment of SEQ ID NO: 421) and additional nucleotide sequence SEQ ID NO: 417 and a right end comprising nucleotide sequence SEQ ID NO: 419 immediately followed by an ITR with nucleotide sequence SEQ ID NO: 424 (which is an embodiment of SEQ ID NO: 422) immediately followed by a 5′-TTAA-3′ target sequence. The transposon was configured so that the multi-hairpin amiRNA, the glutamine synthetase gene and the genes for both antibody chains, as well as all necessary operably linked control elements were transposable by a corresponding transposase.

[0257] Transposons were co-transfected with mRNA encoding transposase with polypeptide sequence SEQ ID NO: 472 into a CHO cell line with no functional glutamine synthetase gene. The pool of transfected cells were grown in the absence of glutamine added to the media until their viability reached 95%. They were then grown in a 14 day fed-batch using Sigma Advanced Fed Batch media. Protein was purified from the culture supernatant using protein A affinity chromatography, reduced with dithiothreitol, and analyzed on an Agilent QTOF mass spectrometer. We integrated the area under the peaks at 50,456 Da (corresponding to the heavy chain modified by G₀: the conserved heptasaccharide core composed of 2 N-acetylglucosamine, 3 mannose and 2 other N-acetylglucosamine residues that are β-1,2 linked to α-6 mannose and α-3 mannose, forming two arms) and 50,602 (corresponding to the heavy chain modified by G_{0F}: the conserved heptasaccharide core plus a fucose residue) to calculate the relative proportion of fucosylated and afucosylated antibody. Results are shown in Table 6.

[0258] Table 6 shows that when the inhibitory 5′ UTR sequences with SEQ ID NOs 402 or 403 are placed between the PGK promoter and the glutamine synthetase gene, the antibody titer is approximately 2 g/L (Table 6 rows 2 and 3). This is very similar to the titer seen with a more highly attenuated glutamine synthetase but no amiRNA hairpins in the 3′ UTR of the gene (Table 6 row 1), and more than twice the titer seen in the absence of this attenuating 5′ UTR element in Section 6.1.2.1 and Table 5 row 5. However, in the absence of the amiRNA, 82% of the antibody is fucosylated (Table 6 column G), consistent with the 80-85% fucosylation seen I Sections 6.1.1.1 and 6.1.1.2. When the transposons contained the amiRNA in the 3′UTR of the glutamine synthetase gene, the antibody is fully afucosylated (Table 6 column F). Use of the weaker HSV-TK promoter also resulted in fully afucosylated antibody (Table 6 rows 4 and 5), although the titer was not as high as with the PGK promoter.

[0259] The antibody open reading frames in transposons shown in rows 1-5 were operably liked to EF1 promoters. In rows 6-7 the antibody open reading frames were operably linked to CMV promoters. In row 6 the glutamine synthetase gene lacked multi-hairpin amiRNA sequences in the 3′ UTR. As with the EF1-driven antibody in row 1, the antibody was approximately 80% fucosylated, with a titer of 4.2 g/L. In row 7 the glutamine synthetase gene comprised multi-hairpin amiRNA sequence with nucleotide sequence SEQ ID NO: 194 in the 3′ UTR. As with the EF1-driven antibody in rows 2-5, antibody fucosylation was completely suppressed, while the titer exceeded 3 g/L.

[0260] We conclude that it is possible to incorporate multi-hairpin amiRNAs into the 3′ UTR of a selectable marker on a transposon, integrate the transposon into the genome of a cultured mammalian cell and obtain good titers of genes expressed from the transposon while simultaneously completely inhibiting genes endogenous to the cultured mammalian cell. Exemplary sequences of glutamine synthetase genes comprising multi-hairpin amiRNA sequences targeting CHO FUT8 mRNA are nucleic acid sequences SEQ ID NOs: 548-557.

### 6.2 Engineering of Glutamine Synthetase Knockdown with Micro RNAs

### 6.2.1 Glutamine Synthetase-Targeting microRNAs

[0261] As described in Section 5.4, multi-hairpin amiRNA with nucleotide sequence SEQ ID NO: 209 comprised 3 guide strand sequences complementary to 3 different sequences in the Chinese Hamster Cricetulus griseus glutamine synthetase mRNA. Multi-hairpin amiRNA, with nucleotide sequence SEQ ID NO: 209 comprised three hairpins; the first hairpin comprised guide strand sequence SEQ ID NO: 53, immediately followed by loop sequence SEQ ID NO: 241 and passenger strand sequence SEQ ID NO: 138, the second hairpin comprised guide strand sequence SEQ ID NO: 54, immediately followed by loop sequence SEQ ID NO: 241 and passenger strand sequence SEQ ID NO: 139, the third hairpin comprised guide strand sequence SEQ ID NO: 55, immediately followed by loop sequence SEQ ID NO: 241 and passenger strand sequence SEQ ID NO: 140. Each of these three guide strand sequences was a 22 base sequence that was an exact reverse complement of a different region within the Cricetulus griseus glutamine synthetase mRNA. Each passenger strand sequence was complementary to its corresponding guide strand sequence, except that the bases in the passenger strand sequences corresponding to the 5′ base of the guide strand and the twelfth base of the guide strand were changed to be non-complementary. The first and twelfth bases of guide strand with SEQ ID NO: 53 are T and T respectively, the corresponding bases in the corresponding passenger strand sequence SEQ ID NO: 138 are C and C respectively. The first and twelfth bases of guide strand with SEQ ID NO: 54 are T and A respectively, the corresponding bases in the corresponding passenger strand sequence SEQ ID NO: 139 are C and C respectively. The first and twelfth bases of guide strand with SEQ ID NO: 55 are T and G respectively, the corresponding bases in the corresponding passenger strand sequence SEQ ID NO: 140 are C and A respectively. Each hairpin in multi-hairpin amiRNA with nucleotide sequence SEQ ID NO: 209 further comprised additional stem-stabilizing sequences, with stem sequence SEQ ID NO: 255 immediately preceding the guide strand sequence, and stem sequence SEQ ID NO: 256 immediately following the passenger strand sequence. Multi-hairpin amiRNA sequences with nucleotide sequence SEQ ID NO: 209 further comprised an unstructured sequence with SEQ ID NO: 251 to the 5′ of the first hairpin, and an unstructured sequence with SEQ ID NO: 253 to the 3′ of the third hairpin. Multi-hairpin amiRNA sequence with nucleotide sequence SEQ ID NO: 209 further comprised an unstructured sequence with SEQ ID NO: 272 between the first and second hairpins, and an unstructured sequence with SEQ ID NO: 273 between the second and third hairpins. Each guide strand sequence is different, and each is complementary to the mRNA for Cricetulus griseus glutamine synthetase (SEQ ID NO: 10).

[0262] The multi-hairpin amiRNA was cloned into a piggyBac-like transposon to the 3′ of a spacer polynucleotide with nucleotide sequence SEQ ID NO: 280, and operably linked to a PGK promoter with nucleotide sequence SEQ ID NO: 386. The nucleotide sequence of the multi-hairpin amiRNA gene is given as SEQ ID NO: 540. The piggyBac-like transposon further comprised a selectable marker conferring resistance to G418/neomycin with amino acid sequence SEQ ID NO: 296. The piggyBac-like transposon further comprised a target sequence 5′-TTAA-3′ immediately followed by an ITR with nucleotide sequence SEQ ID NO: 448 (which is an embodiment of SEQ ID NO: 564), immediately followed by further transposon end sequences with nucleotide sequence SEQ ID NO: 445. The piggyBac-like transposon further comprised nucleotide sequence SEQ ID NO: 446, immediately followed by a second ITR with nucleotide sequence SEQ ID NO: 449 (which is an embodiment of SEQ ID NO: 447), immediately followed by the target sequence 5′-TTAA-3′. The transposon was configured so that the multi-hairpin amiRNA, the spacer polynucleotide and the gene encoding the selectable marker, as well as all necessary operably linked control elements, were transposable by a corresponding transposase. The full sequence of the transposon comprising the multi-hairpin amiRNA gene and selectable marker is given as SEQ ID NO: 544.

[0263] The transposon was co-transfected with mRNA encoding transposase with polypeptide sequence SEQ ID NO: 523 into a CHO cell line with intact glutamine synthetase genes. The pool of transfected cells were grown in the presence of 600 or 1,000 μg/ml G418 plus 5 mM glutamine until their viability reached 95%.

[0264] A control transposon comprised an open reading frame encoding RFP and a selectable marker gene conferring resistance to puromycin but lacked any multi-hairpin amiRNA sequences. The control transposon was introduced with mRNA encoding its corresponding transposase into the same CHO cell line with an intact glutamine synthetase gene. The pool of transfected cells were grown in the presence of 6 or 8 μg/ml puromycin plus 5 mM glutamine until their viability reached 95%.

[0265] After the transfected cell pools had recovered to >95% viability, we tested their ability to grow in the absence of glutamine. Cells were transferred to Sigma Advanced Fed Batch media lacking glutamine to an initial a density of 0.3×10⁶ live cells/ml. The viable cell density was measured at various times after the removal of glutamine. On the fourth day, cells were diluted back to a density of 0.3×10⁶ live cells/ml in media lacking glutamine, to ensure that growing cells had sufficient nutrients. Table 7 shows that the pool of cells transfected with the control transposon lacking a multi-hairpin amiRNA experienced an initial period of slow growth as they adapted to the glutamine-free media, but by day 4 the viable cell density had increased approximately 3-fold (Table 7 columns D and E, compare rows 3 and 5). After this, the viable cell density approximately tripled between dilution on day 4 and day 6 and doubled again between day 6 and day 8. In contrast, the pool of cells transfected with a transposon comprising the multi-hairpin amiRNA with nucleotide sequence SEQ ID NO: 209 and selected with 600 μg/ml G418 increased their viable cell density by less than 50% between day 1 and day 4 (Table 7 column C, compare rows 3 and 5), while the pool of cells transfected with a transposon comprising the multi-hairpin amiRNA with nucleotide sequence SEQ ID NO: 209 and selected with 1,000 μg/ml G418 failed to increase their viable cell density at all (Table 7 column B, compare rows 3 and 5). The viable cell density then began to fall for both pools transfected with a transposon comprising the multi-hairpin amiRNA with nucleotide sequence SEQ ID NO: 209 at day 6 (Table 7 columns B and C, compare rows 6, 7 and 8). By day 8 the viable cell density had fallen precipitously to less than 0.02×10⁶ live cells/ml. There was no difference between the growth of cells transfected with the control transposon or the transposon comprising the multi-hairpin amiRNA with nucleotide sequence SEQ ID NO: 209 in the presence of glutamine: all pools grew well. We conclude that a multi-hairpin amiRNA comprising guide strand sequences complementary to three different sequences within the CHO glutamine synthetase mRNA target (nucleotide sequence SEQ ID NO: 10) can be used to make a CHO cell dependent upon exogenously provided glutamine. The cells in this pool had been selected with neomycin/G418, which allowed growth of cells whose genomes comprised the transposon comprising the multi-hairpin amiRNA. By day 8 the viable cell density had fallen from 300,000 cells/ml to less than 20,000 cells/ml, indicating that less than 7% of the cells were still alive. By using the multi-hairpin amiRNA gene we were able to produce a pool of cells in which expression of the essential metabolic enzyme glutamine synthetase was inhibited to a level that prevents growth of the cell in greater than 93% of the cells in the pool.

[0266] The multi-hairpin amiRNA with nucleotide sequence SEQ ID NO: 209 was also cloned into three other piggyBac-like transposons, also to the 3′ of a spacer polynucleotide with nucleotide sequence SEQ ID NO: 280. In the first transposon the multi-hairpin amiRNA was operably linked to a PGK promoter with nucleotide sequence SEQ ID NO: 385. The nucleotide sequence of this multi-hairpin amiRNA gene is given as SEQ ID NO: 542. In the second transposon the multi-hairpin amiRNA was operably linked to an EF1 promoter with nucleotide sequence SEQ ID NO: 314. The nucleotide sequence of this multi-hairpin amiRNA gene is given as SEQ ID NO: 541. In the third transposon the multi-hairpin amiRNA was operably linked to an EEF2 promoter with nucleotide sequence SEQ ID NO: 350. The sequence of this multi-hairpin amiRNA gene is given as SEQ ID NO: 543. Each of these three piggyBac-like transposons further comprised a selectable marker conferring resistance to puromycin with amino acid sequence given by SEQ ID NO: 302. The piggyBac-like transposon further comprised a target sequence 5′-TTAA-3′ immediately followed by an ITR with the nucleotide sequence SEQ ID NO: 427, immediately followed by further transposon end s nucleotide sequence SEQ ID NO: 425. The piggyBac-like transposon further comprised a nucleotide sequence SEQ ID NO: 426, immediately followed by an ITR with the nucleotide sequence SEQ ID NO: 428, immediately followed by the target sequence 5′-TTAA-3′. The transposon was configured so that the multi-hairpin amiRNA, the spacer polynucleotide and the gene encoding the selectable marker, as well as all necessary operably linked control elements, were transposable by a corresponding transposase. The full sequence of the first, second and third transposons comprising the multi-hairpin amiRNA gene and selectable marker are given as nucleotide sequences SEQ ID NO: 546, 545 and 547 respectively. Each transposon was separately co-transfected with mRNA encoding transposase with polypeptide sequence SEQ ID NO: 502 into a CHO cell line with intact glutamine synthetase genes. The pool of transfected cells were grown in the presence of 10 μg/ml puromycin plus 5 mM glutamine until their viability reached 95%. After the cell pools had recovered to >95% viability, we tested their ability to grow in the absence of glutamine. Cells were transferred to Sigma Advanced Fed Batch media lacking glutamine to an initial a density of 0.3×10⁶ live cells/ml. The pool of cells derived from each transposon behaved essentially as shown in Table 7 for the pools selected with 600 or 1,000 ug/ml neomycin. We conclude that multi-hairpin amiRNA sequence with nucleotide sequence SEQ ID NO: 209 can be operably linked to a variety of different promoters, placed into a variety of different piggyBac-like transposons and integrated into the host genome by the corresponding transposase, in order to inhibit glutamine synthetase expression in CHO cells and make those cells dependent upon exogenously provided glutamine.

### 6.2.2 Clonal Cell Lines Comprising Genomically Integrated Multi-Hairpin amiRNA Directed Toward Glutamine Synthetase

[0267] Three monoclonal lines (#23, #38 and #129) were derived from the pool transfected with the transposon comprising multi-hairpin amiRNA with nucleotide sequence SEQ ID NO: 209 and selected with 1,000 μg/ml G418 described in Section 6.2.1. Growth of these clonal cell lines in the presence and absence of glutamine was compared with the growth of a cell line in which both genomic copies of the glutamine synthetase gene comprised inactivating mutations.

[0268] Cells were transferred to Sigma Advanced Fed Batch media lacking glutamine to an initial a density of 0.3×10⁶ live cells/ml. The viable cell density was measured at various times after the removal of glutamine. Table 8 shows that the clonal cell lines behaved similarly to the cell pool shown in Table 7. All three clonal lines showed a decrease in viable cell density beginning around day 6 (Table 8, columns B, C and D). The cell line in which both genomic copies of the glutamine synthetase gene comprised inactivating mutations showed a somewhat earlier decline in viable cell density, beginning around day 4 (Table 8, column E). In contrast, in the presence of glutamine, the viable cell density in all of the cell lines remained high until between day 7 and day 10. We observed some decrease in viable cell density at day 10. We believe that this is because in this experiment the cells were not diluted into fresh media at day 4. By day 4 in the presence of glutamine all cells had reached their maximum viable cell densities (Table 8 row 5), so by day 10 they were running out of nutrients. We conclude that all three monoclonal cell lines are dependent upon exogenously provided glutamine, and we expect that a glutamine synthetase gene can therefore be used as a selectable marker to select for integration of a second transposon into the genome of the cell.

### 6.2.3 Expression of an Antibody by Using Glutamine Synthetase Selection in a CHO Cell where Glutamine Synthetase has been Knocked Down Using a Multi-Hairpin amiRNA

[0269] Glutamine synthetase selection was used to integrate transposons for antibody expression into the monoclonal lines and the cell line in which both genomic copies of the glutamine synthetase gene comprised inactivating mutations described in Section 6.2.2.

[0270] One transposon (with nucleotide sequence SEQ ID NO: 290) comprised an open reading frame encoding a polypeptide comprising a mature light chain with polypeptide sequence SEQ ID NO: 286 operably linked to a murine EF1 promoter and a polyadenylation sequence, and an open reading frame encoding a polypeptide comprising a mature heavy chain with polypeptide sequence SEQ ID NO: 288 operably linked to a human EF1 promoter and a polyadenylation sequence. The transposon further comprised an open reading frame with nucleotide sequence SEQ ID NO: 309 encoding a glutamine synthetase gene with amino acid sequence SEQ ID NO: 308, operably linked to a heterologous promoter and heterologous 3′UTR and polyadenylation signal sequence. A second transposon (with nucleotide sequence SEQ ID NO: 289) comprised an open reading frame encoding a polypeptide comprising a mature light chain with polypeptide sequence SEQ ID NO: 286 operably linked to a human CMV promoter and a polyadenylation sequence, and an open reading frame encoding a polypeptide comprising a mature heavy chain with polypeptide sequence SEQ ID NO: 288 operably linked to a human CMV promoter and a polyadenylation sequence. The transposon further comprised an open reading frame with nucleotide sequence SEQ ID NO: 309 encoding a glutamine synthetase gene with amino acid sequence SEQ ID NO: 308, operably linked to a heterologous promoter and heterologous 3′UTR and polyadenylation signal sequence. The three guide strand sequences in multi-hairpin amiRNA with nucleotide sequence SEQ ID NO: 209 are all complementary to different sequences within the natural 3′ UTR of the Cricetulus griseus glutamine synthetase gene. Thus, expression of the glutamine synthetase gene from the transposons comprising the antibody-encoding sequences should not be affected by the anti-glutamine synthetase multi-hairpin amiRNA gene.

[0271] Both transposons further comprised a left end comprising a 5′-TTAA-3′ target sequence immediately followed by an ITR with nucleotide sequence SEQ ID NO: 423 (which is an embodiment of SEQ ID NO: 421) and additional nucleotide sequence SEQ ID NO: 417 and a right end comprising nucleotide sequence SEQ ID NO: 417 immediately followed by an ITR with nucleotide sequence SEQ ID NO: 424 (which is an embodiment of SEQ ID NO: 422) immediately followed by a 5′-TTAA-3′ target sequence. The transposons were configured so that the glutamine synthetase gene and the genes for both antibody chains, as well as all necessary operably linked control elements were transposable by a corresponding transposase.

[0272] Transposons were co-transfected with mRNA encoding transposase with polypeptide sequence SEQ ID NO: 472 into four different CHO cell lines: one in which both genomic copies of the gene comprised inactivating deletions, and the other three were clonal cell lines #23, #38 and #129, in which glutamine synthetase was inhibited using a multi-hairpin amiRNA, as described in Sections 6.2.1 and 6.2.2. The corresponding transposase for these transposons is different than the transposase used to transpose the first transposon, described in Section 6.2.1, which comprised the amiRNA gene for inhibiting the natural glutamine synthetase gene in the CHO cell. This ensured that the first transposon was not excised or inactivated by the action of the second transposase. The pools of transfected cells were grown in the absence of glutamine added to the media until their viability reached 95%. They were then grown in a 14 day fed-batch using Sigma Advanced Fed Batch media. Protein concentration in the supernatant was measured using an Octet. Results are shown in Table 9. The amount of antibody produced by cells in which glutamine synthetase expression had initially been inhibited by engineering mutations into the genomic copies of the genes (Table 9 rows 4 and 8) were comparable with the amount of antibody produced by the 3 cell lines in which glutamine synthetase expression was initially inhibited by the amiRNA gene (compare rows 1-3 with row 4, and rows 5-7 with row 8). The attenuated glutamine synthetase gene in the second transposon is thus capable of selecting for the same high level of expression of other genes on the second transposon in cells whose glutamine synthetase expression has been inhibited by interfering RNA as in those whose glutamine synthetase was inhibited by direct genetic mutation of the glutamine synthetase gene.

[0273] We conclude that in mammalian cells in which glutamine synthetase expression has been reduced by integrating into the genome a first transposon comprising a multi-hairpin amiRNA gene comprising nucleotide sequence SEQ ID NO: 209, cells whose genomes comprise a second transposon can be selected by using a gene encoding glutamine synthetase as a selectable marker on the second transposon. The second transposon comprised additional genes expressible in the mammalian cell to produce an antibody. The productivity of this glutamine synthetase knock-down cell line is comparable with the productivity of a cell line in which the glutamine synthetase was inactivated by genomic mutations.

### 6.2.4 Stability of Antibody Expression from a CHO Cell where Glutamine Synthetase has been Knocked Down Using a Multi-Hairpin amiRNA

[0274] The pool of cells obtained by transfecting clone 129 from Section 6.2.2 with the antibody-expressing transposon with nucleotide sequence SEQ ID NO: 290 (as described in Section 6.2.3 and shown in Table 9 row 7) was passaged for 30 or 60 population doublings to assess the stability of expression in the presence or absence of G418, the selection initially used to introduce the glutamine-synthetase-inhibiting multi-hairpin amiRNA. A clonal cell line is regarded as “stable” if its productivity after 60 population doublings is still at least 70% of the original productivity. Pools of CHO cells whose genomes include antibody-encoding genes typically show some additional decline in productivity as they are passaged as a result of population dynamics: lower producing cells tend to grow more quickly as they have a lower metabolic burden, and they take over the pool.

[0275] After passaging cells were grown in a 14 day fed-batch using Sigma Advanced Fed Batch media. Protein concentration in the supernatant was measured using an Octet. Results are shown in Table 10. Column F shows the antibody titer produced at day 14, column G shows the titer as a percentage of the unpassaged pool (row 1). Table 10 shows that cell pools passaged for 30 or 60 population-doublings in the presence of G418 produced 89% and 85% respectively of the day 14 antibody titer produced by the unpassaged pool. In the absence of G418, stability was even better: even after 60 population-doublings in the absence of G418, the cell pool still produced close to 95% of the day 14 antibody titer produced by the unpassaged pool. All of these titers are substantially above what is generally considered the threshold for “clonal stability”.

[0276] We conclude that if a gene encoding an essential enzyme is inhibited using genomically-integrated multi-hairpin amiRNA genes, and if the genomic integration of a second polynucleotide comprising a complementing selectable marker provides an alternative way for the cell to perform the inhibited essential function, then the expression of other genes encoded on the second polynucleotide can be stably maintained.

### 6.3 Sialidase Knockdown with Micro RNAs

### 6.3.1 Neu2-Targeting microRNAs

[0277] As described in Section 5.6, multi-hairpin amiRNAs may be used to inhibit sialidases and thereby increase the sialic acid content of polypeptides produced by a cell. A gene encoding a multi-hairpin amiRNA, with nucleotide sequence SEQ ID NO: 568, comprised three hairpins; the first hairpin comprised guide strand sequence SEQ ID NO: 92, immediately followed by loop sequence SEQ ID NO: 241 and passenger strand sequence SEQ ID NO: 177, the second hairpin comprised guide strand sequence SEQ ID NO: 91, immediately followed by loop sequence SEQ ID NO: 241 and passenger strand sequence SEQ ID NO: 176, the third hairpin comprised guide strand sequence SEQ ID NO: 90, immediately followed by loop sequence SEQ ID NO: 241 and passenger strand sequence SEQ ID NO: 175. Each of these three guide strand sequences was a 22 base sequence that was an exact reverse complement of a different region within the Cricetulus griseus glutamine synthetase mRNA. Each passenger strand sequence was complementary to its corresponding guide strand sequence, except that the bases in the passenger strand sequences corresponding to the 5′ base of the guide strand and the twelfth base of the guide strand were changed to be non-complementary. The first and twelfth bases of guide strand with SEQ ID NO: 92 are A and G respectively, the corresponding bases in the corresponding passenger strand sequence SEQ ID NO: 177 are C and A respectively. The first and twelfth bases of guide strand with SEQ ID NO: 91 are T and T respectively, the corresponding bases in the corresponding passenger strand sequence SEQ ID NO: 176 are C and C respectively. The first and twelfth bases of guide strand with SEQ ID NO: 90 are T and G respectively, the corresponding bases in the corresponding passenger strand sequence SEQ ID NO: 175 are C and A respectively. Each hairpin in multi-hairpin amiRNA with nucleotide sequence SEQ ID NO: 568 further comprised additional stem-stabilizing sequences, with stem sequence SEQ ID NO: 255 immediately preceding the guide strand sequence, and stem sequence SEQ ID NO: 256 immediately following the passenger strand sequence. Multi-hairpin amiRNA sequences with nucleotide sequence SEQ ID NO: 568 further comprised an unstructured sequence with SEQ ID NO: 251 to the 5′ of the first hairpin, and an unstructured sequence with SEQ ID NO: 253 to the 3′ of the third hairpin. Multi-hairpin amiRNA sequence with nucleotide sequence SEQ ID NO: 568 further comprised an unstructured sequence with nucleotide sequence SEQ ID NO: 272 between the first and second hairpins, and an unstructured sequence with nucleotide sequence SEQ ID NO: 273 between the second and third hairpins. Each guide strand sequence is different, and each is complementary to the mRNA for Cricetulus griseus Neu2 (nucleotide sequence SEQ ID NO: 570).

[0278] The multi-hairpin amiRNA was cloned into a piggyBac-like transposon to the 3′ of a spacer polynucleotide with nucleotide sequence SEQ ID NO: 280, and operably linked to a PGK promoter with nucleotide sequence SEQ ID NO: 385. The nucleotide sequence of the multi-hairpin amiRNA gene is given as SEQ ID NO: 593. The piggyBac-like transposon further comprised a selectable marker conferring resistance to puromycin with amino acid sequence SEQ ID NO: 302. The piggyBac-like transposon further comprised a target sequence 5′-TTAA-3′ immediately followed by an ITR with nucleotide sequence SEQ ID NO: 427, immediately followed by further transposon end sequences with nucleotide sequence SEQ ID NO: 425. The piggyBac-like transposon further comprised nucleotide sequence SEQ ID NO: 426, immediately followed by a second ITR with nucleotide sequence SEQ ID NO: 428, immediately followed by the target sequence 5′-TTAA-3′. The transposon was configured so that the multi-hairpin amiRNA, the spacer polynucleotide and the gene encoding the selectable marker, as well as all necessary operably linked control elements, were transposable by a corresponding transposase. The full nucleotide sequence of the transposon comprising the multi-hairpin amiRNA gene and selectable marker is given as SEQ ID NO: 594.

[0279] The transposon was co-transfected with mRNA encoding transposase with polypeptide sequence SEQ ID NO: 502 into a CHO cell line expressing an Fc fusion to a growth factor receptor (the “sialidase substrate”). This protein is naturally sialylated and was used to determine the activity of sialidases during the cell culturing process. The pool of transfected cells were grown in the presence of 10 μg/ml puromycin until their viability reached 95%.

[0280] After the transfected cell pools had recovered to >95% viability, we tested their ability to produce sialylated protein. A pool of cells transfected with the transposon with nucleotide sequence SEQ ID NO: 594, and a pool of cells transfected with a control transposon without any amiRNA sequences were grown in a 14 day fed-batch using Sigma Advanced Fed Batch media. Protein was purified from the culture supernatant using protein A affinity chromatography, reduced with dithiothreitol, and analyzed by capillary isoelectric focusing (cIEF). The cIEF traces are shown in FIGS. 6A-B. Peaks correspond to different protein glycoforms. Peaks at the higher pI (on the x axis) correspond to less heavily sialylated protein species, peaks at the lower pI correspond to more sialylated protein species.

[0281] FIG. 6A shows that there is a substantial difference between the glycoforms seen in the highly sialylated reference standard (grey line), and the protein produced from the CHO line containing no amiRNA gene. In contrast, FIG. 6B shows that when protein was purified from the pool of cells transfected with the transposon comprising a multi-hairpin amiRNA designed to inhibit the expression of neu2 sialidases, there is a significant shift of the glycoform peaks to more heavily sialylated species, substantially increasing the overlap of the cIEF trace with the reference standard trace. We conclude that stable introduction of amiRNA multihairpin with nucleotide sequence SEQ ID NO: 568 into a CHO cell substantially reduces the removal of sialic acid from proteins produced by CHO cells. We observed essentially identical results when cells were transfected with multi-hairpin amiRNA genes comprising just two neu2-targetting hairpins: one guide strand with nucleotide sequence SEQ ID NO: 91, immediately followed by loop sequence SEQ ID NO: 241 and passenger strand sequence SEQ ID NO: 176, a second guide strand with nucleotide sequence SEQ ID NO: 90, immediately followed by loop sequence SEQ ID NO: 241 and passenger strand sequence SEQ ID NO: 175. We also expressed these hairpins along with between one and seven additional hairpins for inhibition of as many as four additional genes, and in each case we observed the same shift in glycan structures indicating inhibition of sialidase activity. We conclude that an advantageous amiRNA gene for inhibition of sialidases comprises a first guide strand with nucleotide sequence SEQ ID NO: 91 and a second guide strand with nucleotide sequence SEQ ID NO: 90.

### 6.4 Improving Heterologous Interferon Expression by Inhibiting Expression of the Interferon Receptor

### 6.4.1 Interferon Receptor-Targeting microRNAs

[0282] As described in Section 5.7, multi-hairpin amiRNAs may be used to inhibit one or both subunits of the interferon receptor and thereby reduce interferon-mediated retardation of cell growth in cells expressing interferon. We prepared five polynucleotides, four of which comprised multi-hairpin amiRNAs with guide strands complementary to one or both subunits of the interferon receptor, and the fifth comprising no amiRNA sequences as a control.

[0283] One multi-hairpin amiRNA, with nucleotide sequence SEQ ID NO: 598, comprised four hairpins; the first hairpin comprised a guide strand with nucleotide sequence SEQ ID NO: 95, immediately followed by a loop with nucleotide sequence SEQ ID NO: 241 and passenger strand with nucleotide sequence SEQ ID NO: 180, the second hairpin comprised a guide strand with nucleotide sequence SEQ ID NO: 97, immediately followed by a loop with nucleotide sequence SEQ ID NO: 241 and passenger strand with nucleotide sequence SEQ ID NO: 182, the third hairpin comprised a guide strand with nucleotide sequence SEQ ID NO: 96, immediately followed by a loop with nucleotide sequence SEQ ID NO: 241 and a passenger strand with nucleotide sequence SEQ ID NO: 181, the fourth hairpin comprised a guide strand with nucleotide sequence SEQ ID NO: 98, immediately followed by a loop with nucleotide sequence SEQ ID NO: 241 and a passenger strand with nucleotide sequence SEQ ID NO: 183. Each of these four guide strand sequences was a 22 base sequence that was an exact reverse complement of a different region within the Cricetulus griseus interferon receptor subunit 1 mRNA (with nucleotide sequence SEQ ID NO: 19. Each passenger strand sequence was complementary to its corresponding guide strand sequence, except that the bases in the passenger strand sequences corresponding to the 5′ base of the guide strand and the twelfth base of the guide strand were changed to be non-complementary.

[0284] One multi-hairpin amiRNA, with nucleotide sequence SEQ ID NO: 599, comprised four hairpins; the first hairpin comprised a guide strand with nucleotide sequence SEQ ID NO: 103, immediately followed by a loop with nucleotide sequence SEQ ID NO: 241 and passenger strand with nucleotide sequence SEQ ID NO: 188; the second hairpin comprised a guide strand with nucleotide sequence SEQ ID NO: 104, immediately followed by a loop with nucleotide sequence SEQ ID NO: 241 and passenger strand with nucleotide sequence SEQ ID NO: 189; the third hairpin comprised a guide strand with nucleotide sequence SEQ ID NO: 102, immediately followed by a loop with nucleotide sequence SEQ ID NO: 241 and a passenger strand with nucleotide sequence SEQ ID NO: 187; the fourth hairpin comprised a guide strand with nucleotide sequence SEQ ID NO: 105, immediately followed by a loop with nucleotide sequence SEQ ID NO: 241 and a passenger strand with nucleotide sequence SEQ ID NO: 190. Each of these four guide strand sequences was a 22 base sequence that was an exact reverse complement of a different region within the Cricetulus griseus interferon receptor subunit 2 mRNA (with nucleotide sequence SEQ ID NO: 20). Each passenger strand sequence was complementary to its corresponding guide strand sequence, except that the bases in the passenger strand sequences corresponding to the 5′ base of the guide strand and the twelfth base of the guide strand were changed to be non-complementary.

[0285] One multi-hairpin amiRNA, with nucleotide sequence SEQ ID NO: 600, comprised five hairpins; the first hairpin comprised a guide strand with nucleotide sequence SEQ ID NO: 103, immediately followed by a loop with nucleotide sequence SEQ ID NO: 241 and passenger strand with nucleotide sequence SEQ ID NO: 188; the second hairpin comprised a guide strand with nucleotide sequence SEQ ID NO: 95, immediately followed by a loop with nucleotide sequence SEQ ID NO: 241 and passenger strand with nucleotide sequence SEQ ID NO: 180; the third hairpin comprised a guide strand with nucleotide sequence SEQ ID NO: 104, immediately followed by a loop with nucleotide sequence SEQ ID NO: 241 and a passenger strand with nucleotide sequence SEQ ID NO: 189; the fourth hairpin comprised a guide strand with nucleotide sequence SEQ ID NO: 97, immediately followed by a loop with nucleotide sequence SEQ ID NO: 241 and a passenger strand with nucleotide sequence SEQ ID NO: 182; the fifth hairpin comprised a guide strand with nucleotide sequence SEQ ID NO: 102, immediately followed by a loop with nucleotide sequence SEQ ID NO: 241 and a passenger strand with nucleotide sequence SEQ ID NO: 187. Two of these five guide strand sequences were a 22 base sequence that was an exact reverse complement of a different region within the Cricetulus griseus interferon receptor subunit 1 mRNA (with nucleotide sequence SEQ ID NO: 19); three of these five guide strand sequences were a 22 base sequence that was an exact reverse complement of a different region within the Cricetulus griseus interferon receptor subunit 2 mRNA (with nucleotide sequence SEQ ID NO: 20). Each passenger strand sequence was complementary to its corresponding guide strand sequence, except that the bases in the passenger strand sequences corresponding to the 5′ base of the guide strand and the twelfth base of the guide strand were changed to be non-complementary.

[0286] One multi-hairpin amiRNA, with nucleotide sequence SEQ ID NO: 601, comprised four hairpins; the first hairpin comprised a guide strand with nucleotide sequence SEQ ID NO: 101, immediately followed by a loop with nucleotide sequence SEQ ID NO: 241 and passenger strand with nucleotide sequence SEQ ID NO: 186; the second hairpin comprised a guide strand with nucleotide sequence SEQ ID NO: 99, immediately followed by a loop with nucleotide sequence SEQ ID NO: 241 and passenger strand with nucleotide sequence SEQ ID NO: 184; the third hairpin comprised a guide strand with nucleotide sequence SEQ ID NO: 102, immediately followed by a loop with nucleotide sequence SEQ ID NO: 241 and a passenger strand with nucleotide sequence SEQ ID NO: 187; the fourth hairpin comprised a guide strand with nucleotide sequence SEQ ID NO: 106, immediately followed by a loop with nucleotide sequence SEQ ID NO: 241 and a passenger strand with nucleotide sequence SEQ ID NO: 191. Two of these four guide strand sequences were a 22 base sequence that was an exact reverse complement of a different region within the Cricetulus griseus interferon receptor subunit 1 mRNA (with nucleotide sequence SEQ ID NO: 19); two of these four guide strand sequences were a 22 base sequence that was an exact reverse complement of a different region within the Cricetulus griseus interferon receptor subunit 2 mRNA (with nucleotide sequence SEQ ID NO: 20). Each passenger strand sequence was complementary to its corresponding guide strand sequence, except that the bases in the passenger strand sequences corresponding to the 5′ base of the guide strand and the twelfth base of the guide strand were changed to be non-complementary.

[0287] Each of the five polynucleotides was a transposon which further comprised a left end comprising a 5′-TTAA-3′ target sequence immediately followed by an ITR with SEQ ID NO: 423 (which is an embodiment of SEQ ID NO: 421) and additional sequence with SEQ ID NO: 417 and a right end comprising SEQ ID NO: 419 immediately followed by an ITR with SEQ ID NO: 424 (which is an embodiment of SEQ ID NO: 422) immediately followed by a 5′-TTAA-3′ target sequence. Each transposon further comprised a gene encoding a glutamine synthetase selectable marker. The multi-hairpin amiRNA sequences were incorporated into the 3′ UTR of the glutamine synthetase ORF. The construct lacking amiRNA sequences comprised an intron sequence that provided a comparable level of glutamine synthetase attenuation. Each transposon further comprised the same promoter operably linked to an open reading frame encoding human interferon beta. The nucleotide sequences of transposons comprising multi-hairpin amiRNA sequences SEQ ID NO: 598-601 are given as SEQ ID NOs: 602-605 respectively. The nucleotide sequence of the transposons lacking multi-hairpin amiRNA sequences is given as SEQ ID NO: 606.

[0288] Transposons were co-transfected with mRNA encoding transposase with polypeptide sequence SEQ ID NO: 502 into a CHO host lacking a functional glutamine synthetase gene. The pool of transfected cells were grown in the absence of glutamine until their viability reached 95%. They were then grown in a 10 day fed-batch culture. Interferon beta levels in the culture supernatant were measured using an ELISA assay. The amount of interferon beta produced in two independent cultures are shown in Table 11.

[0289] Table 11 shows that the control transposon expressed 48 μg/ml of interferon beta. The transposon comprising a multi-hairpin amiRNA (with nucleotide sequence SEQ ID NO: 598) with guides complementary only to subunit 1 of the interferon receptor resulted in a small decrease in interferon beta expression (compare rows 1 and 2 in Table 11). However the transposon comprising a multi-hairpin amiRNA (with nucleotide sequence SEQ ID NO: 599) with guides complementary only to subunit 2 of the interferon receptor, and both transposons comprising a multi-hairpin amiRNA (with nucleotide sequences SEQ ID NO: 600 and 601) with guides complementary to both subunits of the interferon receptor resulted in as much as twice the expression levels of interferon beta as the control transposon. We conclude that reducing expression of the interferon receptor using multi-hairpin amiRNAs ameliorates the effects of interferon expression on CHO cells and allows them to express higher levels of human interferon beta.

### 6.5 Engineering of Dihydrofolate Reductase Knockdown with Micro RNAs

### 6.5.1 Dihydrofolate Reductase-Targeting microRNAs

[0290] As described in Section 5.9, multi-hairpin amiRNA with nucleotide sequence SEQ ID NO: 210 comprised 3 guide strand sequences complementary to 3 different sequences in the Chinese Hamster Cricetulus griseus dihydrofolate reductase mRNA. Multi-hairpin amiRNA, with nucleotide sequence SEQ ID NO: 210 comprised three hairpins; the first hairpin comprised guide strand sequence SEQ ID NO: 82, immediately followed by loop sequence SEQ ID NO: 241 and passenger strand sequence SEQ ID NO: 167, the second hairpin comprised guide strand sequence SEQ ID NO: 83, immediately followed by loop sequence SEQ ID NO: 241 and passenger strand sequence SEQ ID NO: 168, the third hairpin comprised guide strand sequence SEQ ID NO: 84, immediately followed by loop sequence SEQ ID NO: 241 and passenger strand sequence SEQ ID NO: 169. Each of these three guide strand sequences was a 22 base sequence that was an exact reverse complement of a different region within the Cricetulus griseus dihydrofolate reductase mRNA. Each passenger strand sequence was complementary to its corresponding guide strand sequence, except that the bases in the passenger strand sequences corresponding to the 5′ base of the guide strand and the twelfth base of the guide strand were changed to be non-complementary. Each hairpin in multi-hairpin amiRNA with nucleotide sequence SEQ ID NO: 210 further comprised additional stem-stabilizing sequences, with stem sequence SEQ ID NO: 255 immediately preceding the guide strand sequence, and stem sequence SEQ ID NO: 256 immediately following the passenger strand sequence. Multi-hairpin amiRNA sequences with nucleotide sequence SEQ ID NO: 210 further comprised an unstructured sequence with SEQ ID NO: 251 to the 5′ of the first hairpin, and an unstructured sequence with SEQ ID NO: 253 to the 3′ of the third hairpin. Multi-hairpin amiRNA sequence with nucleotide sequence SEQ ID NO: 210 further comprised an unstructured sequence with SEQ ID NO: 272 between the first and second hairpins, and an unstructured sequence with SEQ ID NO: 273 between the second and third hairpins. Each guide strand sequence is different, and each is complementary to the mRNA for Cricetulus griseus dihydrofolate reductase (SEQ ID NO: 11).

[0291] The multi-hairpin amiRNA was cloned into a piggyBac-like transposon to the 3′ of a spacer polynucleotide with nucleotide sequence SEQ ID NO: 280, and operably linked to a PGK promoter with nucleotide sequence SEQ ID NO: 386. The nucleotide sequence of the multi-hairpin amiRNA gene is given as SEQ ID NO: 635. The piggyBac-like transposon further comprised a selectable marker conferring resistance to G418/neomycin with amino acid sequence SEQ ID NO: 296. The piggyBac-like transposon further comprised a target sequence 5′-TTAA-3′ immediately followed by an ITR with nucleotide sequence SEQ ID NO: 448 (which is an embodiment of SEQ ID NO: 564), immediately followed by further transposon end sequences with nucleotide sequence SEQ ID NO: 445. The piggyBac-like transposon further comprised nucleotide sequence SEQ ID NO: 446, immediately followed by a second ITR with nucleotide sequence SEQ ID NO: 449 (which is an embodiment of SEQ ID NO: 447), immediately followed by the target sequence 5′-TTAA-3′. The transposon was configured so that the multi-hairpin amiRNA, the spacer polynucleotide and the gene encoding the selectable marker, as well as all necessary operably linked control elements, were transposable by a corresponding transposase. The full sequence of the transposon comprising the multi-hairpin amiRNA gene and selectable marker is given as SEQ ID NO: 597.

[0292] The transposon was co-transfected with mRNA encoding transposase with polypeptide sequence SEQ ID NO: 523 into a CHO cell line with intact dihydrofolate reductase genes. The pool of transfected cells were grown in the presence of 800 μg/ml G418 plus 5 mM glutamine plus HT until their viability reached 95%.

### 6.5.2 A Clonal Cell Line Comprising Genomically Integrated Multi-Hairpin amiRNA Directed Toward Dihydrofolate Reductase

[0293] A monoclonal line (C426) was derived from the pool transfected with the transposon comprising multi-hairpin amiRNA with nucleotide sequence SEQ ID NO: 210 and selected with 800 μg/ml G418 described in Section 6.5.1. Growth of this clonal cell line in the presence and absence of HT and in the absence of HT and presence of 50 nM MTX was compared with the growth of a control cell line from which C426 was derived.

[0294] Cells were transferred to Sigma Advanced Fed Batch media with 5 uM glutamine and to an initial a density of 0.3×10⁶ live cells/ml. Parallel cultures were grown (a) in the presence of HT, (b) in the absence of HT and (c) in the absence of HT and the presence of 50 nM MTX. At day 4, all cultures were diluted to adjust viable cell densities to 0.3×10⁶ cell/ml. At day 8, all cultures were again diluted to adjust viable cell densities to 0.3×10⁶ cell/ml. At day 13, all cultures except for the culture of C426 with 50 nM MTX were again diluted to adjust viable cell densities to 0.3×10⁶ cell/ml.

[0295] Table 12 shows that the clonal cell line C426 behaved similarly to the control cell line in the presence (compare rows 3 and 6) or absence (compare rows 4 and 7) of HT. Thus, DHFR was not inhibited to a level where the cells required HT supplementation of the media to grow. However, when 50 nM MTX was included in the growth media, it exerted a strong cytostatic effect on C426 but not on the control cells. After day 8, 50 nM MTX prevented any increases in viable cell density in C426 (Table 12 row 5). In contrast, the control cells increased their viable cell density to 2.5×10⁶ cell/ml by day 13, when they were diluted back to 0.3×10⁶ cell/ml and again reached 4.74×10⁶ cell/ml by day 18. We conclude that stable integration of multi-hairpin amiRNA with nucleotide sequence SEQ ID NO: 210 into the genome of a CHO cell sensitizes cells to the presence of MTX in the growth media.

### 6.5.3 Expression of an Antibody by Using MTX Selection in a CHO Cell where Dihydrofolate Reductase has been Knocked Down Using a Multi-Hairpin amiRNA

[0296] DHFR selection was used to integrate transposons for antibody expression into the monoclonal line C426 and a control cell line (DG44) in which both genomic copies of the dihydrofolate reductase gene comprised inactivating mutations.

[0297] A gene transfer transposon (with nucleotide sequence SEQ ID NO: 636) comprised an open reading frame encoding a polypeptide comprising a mature light chain with polypeptide sequence SEQ ID NO: 286 operably linked to a murine CMV promoter and a polyadenylation sequence, and an open reading frame encoding a polypeptide comprising a mature heavy chain with polypeptide sequence SEQ ID NO: 288 operably linked to a murine CMV promoter and a polyadenylation sequence. The transposon further comprised an open reading frame with nucleotide sequence SEQ ID NO: 637 encoding a dihydrofolate reductase gene with amino acid sequence SEQ ID NO: 293, operably linked to a heterologous promoter and heterologous 3′UTR and polyadenylation signal sequence. The three guide strand sequences in multi-hairpin amiRNA with nucleotide sequence SEQ ID NO: 210 are all complementary to different sequences within the natural 3′ UTR of the Cricetulus griseus dihydrofolate reductase gene. The introduced DHFR gene on transposon with SEQ ID NO: 636 comprises a heterologous 3′UTR which lacks complementary sequences to the guide strand sequences in multihairpin amiRNA with nucleotide sequence SEQ ID NO: 210. Thus expression of the dihydrofolate reductase gene from the transposon comprising the antibody-encoding sequences should not be affected by the anti-dihydrofolate reductase multi-hairpin amiRNA gene.

[0298] The gene transfer transposon further comprised a left end comprising a 5′-TTAA-3′ target sequence immediately followed by an ITR with nucleotide sequence SEQ ID NO: 423 (which is an embodiment of SEQ ID NO: 421) and additional nucleotide sequence SEQ ID NO: 417 and a right end comprising nucleotide sequence SEQ ID NO: 417 immediately followed by an ITR with nucleotide sequence SEQ ID NO: 424 (which is an embodiment of SEQ ID NO: 422) immediately followed by a 5′-TTAA-3′ target sequence. The transposons were configured so that the dihydrofolate reductase gene and the genes for both antibody chains, as well as all necessary operably linked control elements were transposable by a corresponding transposase.

[0299] The gene transfer transposon with nucleotide sequence SEQ ID NO: 636 was co-transfected with mRNA encoding transposase with polypeptide sequence SEQ ID NO: 472 into two different CHO cell lines: one in which both genomic copies of the gene comprised inactivating deletions, and the other c426, in which dihydrofolate reductase was inhibited using a multi-hairpin amiRNA, as described in Sections 6.5.1 and 6.5.2. The corresponding transposase for these transposons is different than the transposase used to transpose the first transposon, described in Section 6.5.1, which comprised the amiRNA gene for inhibiting the natural dihydrofolate reductase gene in the CHO cell. This ensured that the first transposon was not excised or inactivated by the action of the second transposase. The pools of transfected cells were grown in media lacking HT and supplemented with 50 nM MTX until their viability reached 95%. They were then grown in a 14 day fed-batch using Sigma Advanced Fed Batch media. Protein concentration in the supernatant was measured using an Octet. Results are shown in Table 13. The amount of antibody produced by DG44 cells in which cellular dihydrofolate reductase expression was inhibited by genomic mutations (Table 13 row 1) was comparable with the amount of antibody produced by the c426 cell line in which cellular dihydrofolate reductase expression was inhibited by the multihairpin amiRNA gene (row 2). The viability of DG44 cells fell below 70% by day 12, so the culture had to be stopped. In contrast the viability of the c426 cells remained high until day 14, allowing the culture to progress for longer. The dihydrofolate reductase gene in the second transposon is thus capable of selecting for the same high level of expression of other genes on the second transposon in cells whose dihydrofolate reductase expression has been inhibited by interfering RNA as in those whose dihydrofolate reductase was inhibited by direct genetic mutation of the dihydrofolate reductase gene.

[0300] We conclude that in mammalian cells in which dihydrofolate reductase expression has been reduced by integrating into the genome a first transposon comprising a multi-hairpin amiRNA gene comprising nucleotide sequence SEQ ID NO: 210, cells whose genomes comprise a second transposon can be selected by using a gene encoding dihydrofolate reductase as a selectable marker on the second transposon. The second transposon comprised additional genes expressible in the mammalian cell to produce an antibody. The productivity of this dihydrofolate reductase knock-down cell line is comparable with the productivity of a cell line in which the dihydrofolate reductase was inactivated by genomic mutations.

### Brief Description of Tables

[0301] Table 1. Constructs used to generate the data shown in FIGS. 3A-G. Transposons were constructed as described in Section 6.1.1.1. The multi-hairpin amiRNA whose SEQ ID NO is shown in column C was operably linked to the Pol II promoter shown in column B. The corresponding mass spectroscopy trace is shown in the panel of FIGS. 3A-G indicated in column D.

[0302] Table 2. Inhibition of antibody fucosylation with amiRNAs targeting GMD and GFT. Transposons were constructed as described in Section 6.1.1.4. The amiRNA SEQ ID NO is shown in column A. Following a 14-day fed batch antibody production run, the percentage of antibody that was afucosylated is shown in column B, the percentage that was fucosylated is shown in column C. BDL=below detection limit.

[0303] Table 3. Inhibition of antibody fucosylation in HEK cells with multi-hairpin amiRNAs directed toward different target genes. Transposons were constructed, transfected into HEK cells and selected as described in Section 6.1.1.5. Gene transfer polynucleotides comprised amiRNAs directed toward the genes listed in column A. The multi-hairpin amiRNA had the sequence given by the SEQ ID NO shown in column B; the number of hairpins present in the multi-hairpin amiRNA is shown in column C. Recovered pools were transiently transfected with genes encoding an antibody with mature light chain polypeptide sequence SEQ ID NO: 286 and mature heavy chain polypeptide sequence SEQ ID NO: 287. Following a 7-day culture, the culture supernatant contained the concentration of antibody shown in column F. The percentage of antibody that was afucosylated is shown in column D, the percentage that was fucosylated is shown in column E. BDL=below detection limit.

[0304] Table 4. Inhibition of antibody fucosylation in clonal HEK cell lines with multi-hairpin amiRNAs directed toward FUT8. Clonal cell lines were generated from the pools shown in Table 3 rows 3 and 4. The name of the cell line is shown in column A. Clonal lines were transiently transfected with genes encoding an antibody with mature light chain polypeptide sequence SEQ ID NO: 286 and mature heavy chain polypeptide sequence SEQ ID NO: 287. Following a 7-day culture, the culture supernatant contained the concentration of antibody shown in column D. The percentage of antibody that was afucosylated is shown in column B, the percentage that was fucosylated is shown in column C.

[0305] Table 5. Inhibition of antibody fucosylation with different numbers of amiRNA hairpins. Transposons were constructed as described in Section 6.1.2.1. The SEQ ID NO of the amiRNA gene including the glutamine synthetase ORF and the globin polyA sequence is given in column A. The Pol II promoter shown in column B was operably linked to the amiRNA whose SEQ ID NO is shown in column C. The amiRNA comprised the number of hairpins shown in column D. Following a 14-day fed batch antibody production run, the culture supernatant contained the concentration of antibody shown in column E. The percentage of antibody that was afucosylated is shown in column F, the percentage that was fucosylated is shown in column G. BDL=below detection limit.

[0306] Table 6. Inhibition of antibody fucosylation with multi-hairpin amiRNAs driven by different promoters. Transposons were constructed as described in Section 6.1.2.2. The sequence of the selectable marker glutamine synthetase gene, including multi-hairpin amiRNA sequences in the 3′ UTR, is shown in column A. The Pol II promoter shown in column B was operably linked to the inhibitory 5′ UTR shown in column C which was operably linked to a glutamine synthetase gene. In the 3′ UTR of the glutamine synthetase gene was placed the amiRNA whose SEQ ID NO is shown in column D.

[0307] Following a 14-day fed batch antibody production run, the culture supernatant contained the concentration of antibody shown in column E. The percentage of antibody that was afucosylated is shown in column F, the percentage that was fucosylated is shown in column G. BDL=below detection limit.

[0308] Table 7. Growth of cells with amiRNA targeted toward glutamine synthetase in the absence of glutamine. Cells were transfected with transposons comprising the multi-hairpin amiRNA with SEQ ID NO shown in row 1 and selected by addition of G418 or puromycin at the concentration shown in row 2, as described in Section 6.2.1. After cells had recovered to >95% viability, cells were transferred into glutamine-free media at 0.3×10⁶ viable cells per ml of media. Viable cell densities were measured at various times after the beginning of the experiment: the number of days after initiation of the experiment are shown in column A. At day 4, cells were diluted back to 0.3×10⁶ live cells/ml (row 5 is before dilution, row 6 is after dilution). Columns B-E show viable cell densities x 10⁶ live cells/ml.

[0309] Table 8. Growth of clonal cell lines with amiRNA targeted toward glutamine synthetase in the absence of glutamine. The pool transfected with a transposon comprising multi-hairpin amiRNA with SEQ ID NO: 209 was cloned, and three clonal lines (clone ID shown in row 1) were grown in the presence or absence of glutamine (glutamine concentration is shown in row 2). Growth was compared with the growth of a cell line comprising inactivating mutations in both genomic copies of the glutamine synthetase gene (columns E and I, indicated as GS KO in line 1). Cells were inoculated at 0.3×10⁶ viable cells per ml of media. Viable cell densities were measured at various times after the beginning of the experiment: the number of days after initiation of the experiment are shown in column A. Columns B-I show viable cell densities x 10⁶ live cells/ml.

[0310] Table 9. Expression of an antibody in a glutamine synthetase knockdown cell. The four cell lines described in Section 6.2.2 and shown in Table 8 were transfected with two different transposons comprising open reading frames encoding the heavy and light chains of an antibody, with SEQ ID NO shown in column B, as described in Section 6.2.3. Clone IDs are indicated in column 1: three clones were derived from a pool of cells with two intact genomic copies of the glutamine synthetase gene that had been transfected with multi-hairpin amiRNA with nucleotide sequence SEQ ID NO: 209, in the fourth line both genomic copies of the glutamine synthetase gene comprised inactivating mutations (indicated as GS KO in column 1). Transposon SEQ ID NOs are indicated in column 2. Cells were selected as described in Section 6.2.3. After recovery they were inoculated for a 14-day fed batch, with samples taken after 7, 10, 12 and 14 days for titer measurement by Octet. Antibody titers measured in the culture supernatant are shown in μg/ml in columns C (day 7), D (day 10), E (day 12) and F (day 14).

[0311] Table 10. Stability of expression of an antibody from a glutamine synthetase knockdown cell. The cell pool in which clonal cell line #129 was transfected with transposon with sequence nucleotide SEQ ID NO: 290, as described in Section 6.2.3 and shown in Table 9 row 7, were tested for stability by passaging the cells for 0, 30 and 60 population doublings, as shown in column B. Cells were passaged in the presence or absence of G418, whose concentration is shown in column A. After passaging they were inoculated for a 14-day fed batch, with samples taken after 7, 10, 12 and 14 days for titer measurement by Octet. Antibody titers measured in the culture supernatant are shown in μg/ml in columns C (day 7), D (day 10), E (day 12) and F (day 14). The productivity at day 14 is expressed as a % of the productivity of the cell pool that had not undergone passaging (row 1).

[0312] Table 11. Expression of human interferon beta from CHO cells. Transposons for the expression of human interferon beta were constructed, transfected and expressed as described in Section 6.4.1. The amiRNA SEQ ID NO is shown in column A. Following a 10-day fed batch of duplicate cultures for each sample, the concentration of interferon was measured by ELISA. Measured interferon concentrations in culture supernatants are show in columns B and C. The average concentration from duplicate cultures is shown in column D.

[0313] Table 12. Growth of a clonal cell line with amiRNA targeted toward dihydrofolate reductase. A clonal cell line whose genome comprises a transposon comprising multi-hairpin amiRNA with SEQ ID NO: 210 (C426) was grown in the presence or absence of HT, or in the absence of HT and the presence of 50 nM MTX. Growth was compared with a control CHO-Kl cell line from which C426 was derived. Cells were inoculated at 0.3×10⁶ viable cells per ml of media and cultured as described in Section 6.5.2. Viable cell densities were measured at various times after the beginning of the experiment: the cell line is shown in column A, the presence of HT is indicated in column B and the concentration of MTX is shown in column C. Columns D-L show viable cell densities x 10⁶ live cells/ml. Days since the beginning of the experiment are shown in row 1, results for c426 in rows 3-5, results for the control line in rows 6-8.

[0314] Table 13. Expression of an antibody in a dihydrofolate reductase knockdown cell. The two cell lines described in Section 6.5.3 were transfected with a transposon comprising open reading frames encoding the heavy and light chains of an antibody, with nucleotide sequence SEQ ID NO: 636. Cell lines used are indicated in column 1. Cells were selected as described in Section 6.5.3. After recovery they were inoculated for a 14 day fed batch, with samples taken after 7, 10, 12 and 14 days for titer measurement by Octet. Antibody titers measured in the culture supernatant are shown in μg/ml in columns B (day 7), C (day 10), D (day 12) and E (day 14).

TABLE 1

| | A | B | C | D |
|---|---|---|---|---|
| | Construct name | Promoter | amiRNA SEQ ID NO | FIG. 1 panel |
| 1 | none | N/A | none | A |
| 2 | 344641 | EF1 | 193 | B |
| 3 | 344646 | EF1 | 194 | C |
| 4 | 344651 | EF1 | 195 | D |
| 5 | 344645 | CMV | 193 | E |
| 6 | 344650 | CMV | 194 | F |
| 7 | 344655 | CMV | 195 | G |

TABLE 2

| | A | B | C |
|---|---|---|---|
| | SEQ ID NO: | G0 + G1% (area) | G0F + G1F (% area) |
| 1 | none | 25 | 75 |
| 2 | 200 | 100 | BDL |

TABLE 3

| | A | B | C | D | E | F |
|---|---|---|---|---|---|---|
| | Targeted | SEQ | No of | G0 + G1 % | G0F + G1F | Titer |
| | genes | ID NO: | hairpins | (area) | (% area) | (mg/L) |
| 1 | none | N/A | N/A | BDL | 100 | 233 |
| 2 | none | N/A | N/A | 7 | 93 | 237 |
| 3 | FUT8 | 202 | 3 | 90 | 10 | 353 |
| 4 | FUT8 | 202 | 3 | 89 | 11 | 316 |
| 5 | GMD, GFT | 204 | 4 | 100 | BDL | 126 |
| 6 | GMD, GFT | 204 | 4 | 100 | BDL | 120 |

TABLE 4

| | | B | C | D |
|---|---|---|---|---|
| | A | G0 + G1% | G0F + G1F | Titer |
| | Sample | (area) | (% area) | (mg/L) |
| 1 | HEK 293 | 6 | 94 | 217 |
| 2 | HEK 293 | 10 | 90 | 224 |
| 3 | clonal line 1 | 56 | 44 | 208 |
| 4 | clonal line 1 | 59 | 41 | 225 |
| 5 | clonal line 2 | 80 | 20 | 371 |
| 6 | clonal line 2 | 81 | 19 | 379 |
| 7 | clonal line 3 | 87 | 13 | 116 |
| 8 | clonal line 3 | 87 | 13 | 134 |
| 9 | clonal line 4 | 94 | 6 | 258 |
| 10 | clonal line 4 | 90 | 10 | 248 |

TABLE 5

| | A | B | C | D | E | F | G |
|---|---|---|---|---|---|---|---|
| | GS/amiRNA | Promoter | amiRNA | No of | Titer | G0 % | G0F |
| | SEQ ID NO | SEQ ID NO | SEQ ID NO | hairpins | (mg/L) | (area) | (% area) |
| 1 | 549 | 383 | 194 | 3 | 163 | 100 | BDL |
| 2 | 550 | 350 | 194 | 3 | 443 | 100 | BDL |
| 3 | 551 | 383 | 197 | 1 | 514 | 47.3 | 52.7 |
| 4 | 552 | 383 | 196 | 2 | 770 | 89.9 | 10.1 |
| 5 | 548 | 383 | 194 | 3 | 835 | 100 | BDL |

TABLE 6

| | A | B | C | D | E | F | G |
|---|---|---|---|---|---|---|---|
| | GS/amiRNA gene | Promoter | 5′ UTR | amiRNA | Titer | G0 % | G0F |
| | SEQ ID NO | SEQ ID NO | SEQ ID NO | SEQ ID NO | (mg/L) | (area) | (% area) |
| 1 | 562 | 393 | none | none | 2,130 | 18 | 82 |
| 2 | 553 | 383 | 402 | 194 | 1,837 | 100 | BDL |
| 3 | 554 | 383 | 403 | 194 | 1,933 | 100 | BDL |
| 4 | 555 | 393 | 402 | 194 | 821 | 100 | BDL |
| 5 | 556 | 399 | 403 | 194 | 1,178 | 100 | BDL |
| 6 | 563 | 393 | none | none | 4,200 | 19 | 81 |
| 7 | 557 | 383 | 403 | 194 | 3,100 | 100 | BDL |

TABLE 7

| | A | B | C | D | E |
|---|---|---|---|---|---|
| 1 | SEQ ID NO | 741 | 741 | none | none |
| 2 | Selection | 1000 ug/ml G418 | 600 ug/ml G418 | 8 ug/ml puromycin | 6 ug/ml puromycin |
| | Day | VCD | VCD | VCD | VCD |
| 3 | 0 | 0.30 | 0.30 | 0.30 | 0.30 |
| 4 | 1 | 0.31 | 0.45 | 0.38 | 0.41 |
| 5 | 4 | 0.30 | 0.47 | 0.99 | 0.85 |
| 6 | 4 | 0.30 | 0.30 | 0.30 | 0.30 |
| 7 | 6 | 0.26 | 0.21 | 1.11 | 1.00 |
| 8 | 8 | 0.02 | 0.01 | 2.00 | 2.54 |

TABLE 8

| | A | B | C | D | E | F | G | H | I |
|---|---|---|---|---|---|---|---|---|---|
| 1 | clone # | 23 | 38 | 129 | n/a | 23 | 38 | 129 | n/a |
| 2 | glutamine (mM) | 0 | 0 | 0 | 0 | 5 | 5 | 5 | 5 |
| 3 | 0 | 0.30 | 0.30 | 0.30 | 0.30 | 0.30 | 0.30 | 0.30 | 0.30 |
| 4 | 4 | 0.40 | 0.37 | 0.32 | 0.22 | 3.76 | 6.63 | 4.34 | 5.96 |
| 5 | 5 | 0.36 | 0.36 | 0.30 | 0.06 | 3.93 | 6.96 | 5.58 | 5.21 |
| 6 | 6 | 0.23 | 0.28 | 0.25 | 0.05 | 4.13 | 6.70 | 5.79 | 5.75 |
| 7 | 7 | 0.16 | 0.21 | 0.19 | not done | 3.61 | 6.14 | 5.79 | 5.17 |
| 8 | 10 | 0.09 | 0.06 | 0.03 | 0.06 | 0.68 | 0.74 | 3.17 | 1.98 |

TABLE 9

| | | B | C | D | E | F |
|---|---|---|---|---|---|---|
| | A | Transposon | day | day | day | day |
| | Host cells | SEQ ID NO | 7 | 10 | 12 | 14 |
| 1 | amiRNA clone#23 | 289 | 1,517 | 2,669 | 2,915 | 3,324 |
| 2 | amiRNA clone#38 | 289 | 1,638 | 3,083 | 3,480 | 4,193 |
| 3 | amiRNA clone#129 | 289 | 1,827 | 3,023 | 3,236 | 3,729 |
| 4 | GS KO | 289 | 715 | 1,586 | 2,174 | 2,637 |
| 5 | amiRNA clone#23 | 290 | 1,482 | 2,084 | 2,133 | 2,244 |
| 6 | amiRNA clone#38 | 290 | 1,363 | 2,146 | 2,151 | 2,273 |
| 7 | amiRNA clone#129 | 290 | 1,328 | 2,286 | 2,575 | 3,044 |
| 8 | GS KO | 290 | 1,059 | 1,618 | 1,802 | 2,019 |

TABLE 10

| | A | B | C | D | E | F | G |
|---|---|---|---|---|---|---|---|
| | G418 Concentration | Population doublings | Day 7 | Day 10 | Day 12 | Day 14 | % of control |
| 1 | 400 ug/ml | 0 | 2,031 | 2,425 | 3,286 | 3,355 | 100 |
| 2 | 400 ug/ml | 30 | 1,123 | 1,999 | 2,887 | 2,997 | 89.3 |
| 3 | 400 ug/ml | 60 | 1,132 | 1,909 | 2,743 | 2,869 | 85.5 |
| 4 | 0 | 30 | 1,605 | 2,350 | 3,241 | 3,418 | 101.9 |
| 5 | 0 | 60 | 1,348 | 2,144 | 3,174 | 3,179 | 94.8 |

TABLE 11

| | A | B | C | D |
|---|---|---|---|---|
| | amiRNA SEQ | Titer | Titer | Average Titer |
| | ID NO | (ug/ml) | (ug/ml) | (ug/ml) |
| 1 | none | 48 | 48.3 | 48.2 |
| 2 | 598 | 22.8 | 46.1 | 34.5 |
| 3 | 599 | 92.9 | 105.7 | 99.3 |
| 4 | 600 | 80.3 | 79.2 | 79.8 |
| 5 | 601 | 97.3 | 78.6 | 88.0 |

TABLE 12

| | A | B | C | D | E | F | G | H | I | J | K | L |
|---|---|---|---|---|---|---|---|---|---|---|---|---|
| 1 | Day | n/a | n/a | 4 | 6 | 8 | 8 | 11 | 13 | 13 | 15 | 18 |
| 2 | Cell line | HT | MTX (nM) | n/a | n/a | n/a | n/a | n/a | n/a | n/a | n/a | n/a |
| 3 | C426 | yes | 0 | 0.30 | 0.38 | 5.07 | 0.30 | 2.16 | 5.62 | 0.30 | 1.17 | 7.47 |
| 4 | C426 | no | 0 | 0.30 | 0.24 | 3.12 | 0.30 | 2.91 | 5.04 | 0.30 | 0.63 | 6.55 |
| 5 | C426 | no | 50 | 0.30 | 0.04 | 1.87 | 0.30 | 0.28 | 0.26 | 0.26 | 0.13 | 0.26 |
| 6 | control | yes | 0 | 0.30 | 0.64 | 5.94 | 0.30 | 4.94 | 9.01 | 0.30 | 2.02 | 7.96 |
| 7 | control | no | 0 | 0.30 | 0.67 | 5.87 | 0.30 | 4.69 | 8.74 | 0.30 | 1.59 | 5.80 |
| 8 | control | no | 50 | 0.30 | 0.08 | 1.19 | 0.30 | 1.35 | 2.46 | 0.30 | 0.69 | 4.74 |

TABLE 13

| | A | B | C | D | E |
|---|---|---|---|---|---|
| | Host cells | day 7 | day 10 | day 12 | day 14 |
| 1 | amiRNA c426 | 953 | 2,106 | 2,933 | 3,391 |
| 2 | DG44 | 2,371 | 3,237 | 3,362 | n/d |

### 7. REFERENCES

[0315] All references cited herein are incorporated herein by reference in their entirety and for all purposes to the same extent as if each individual publication or patent or patent application was specifically and individually indicated to be incorporated by reference in its entirety for all purposes. U.S. 62/846,847, filed May 13, 2019, U.S. 62/870,321, filed Jul. 3, 2019, U.S. 62/981,417 filed Feb. 25, 2020, U.S. 63/019,733 filed May 4, 2020, PCT/US2020/032381 filed May 11, 2020, and U.S. Ser. No. 16/872,051 filed May 11, 2020, described related subject matter and are incorporated by reference in their entirety for all purposes.

[0316] Many modifications and variations of this invention can be made without departing from its spirit and scope, as will be apparent to those skilled in the art. The specific embodiments described herein are offered by way of example only, and the invention is to be limited only by the terms of the appended claims, along with the full scope of equivalents to which such claims are entitled. To the extent different content is associated with an accession number or other reference at different times, the content in effect as of the earlier of the application filing date or filing date of earliest priority application disclosing the accession number in question is meant. Unless otherwise apparent from the context any element, embodiment, step, feature or aspect of the invention can be performed in combination with any other.

What is claimed is:

1. A polynucleotide comprising
a) a segment encoding a multi-hairpin amiRNA sequence, wherein the segment comprises
i) a first guide strand sequence comprising a contiguous 19 nucleotide sequence that is perfectly complementary to a first target site in a natural mammalian cellular mRNA of SEQ ID NO: 11 and a first passenger strand sequence comprising a contiguous 19 nucleotide sequence that is at least 78% complementary to the first guide strand sequence, wherein the first guide strand and first passenger strand sequence are separated by between 5 and 35 nucleotides;
ii) a second guide strand sequence comprising a contiguous 19 nucleotide sequence that is perfectly complementary to a second target site different than the first target site in the same natural mammalian cellular mRNA as the first guide strand sequence and a second passenger strand sequence comprising a contiguous 19 nucleotide sequence that is at least 78% complementary to the second guide strand sequence, wherein the second guide strand and second passenger strand sequences are separated by between 5 and 35 nucleotides, and wherein the first and second guide strand sequences are different from each other; and
b) a eukaryotic promoter that is active in a mammalian cell and is transcribed by RNA polymerase II or RNA polymerase III operably linked to the segment encoding the amiRNA sequence, wherein the amiRNA sequence can be expressed and fold into multiple hairpins;
wherein the first and second guide strand sequences are selected from SEQ ID NOs: 82-84 and 607-616.

2. The polynucleotide of claim 1, wherein the first guide strand sequence is a 19-22 nucleotide sequence perfectly complementary to the natural mammalian cellular mRNA and the first passenger strand sequence has the same length as the first guide sequence.

3. The polynucleotide of claim 1, wherein the first guide strand sequence is a 19-22 nucleotide sequence perfectly complementary to the natural mammalian cellular mRNA and the first passenger strand sequence is shorter than the first guide sequence.

4. The polynucleotide of any preceding claim, wherein the first and second target sites do not overlap.

5. The polynucleotide of any preceding claim, wherein the segment encoding the multi-hairpin amiRNA sequence further comprises a third guide strand sequence comprising a contiguous 19 nucleotide sequence that is perfectly complementary to the same natural mammalian cellular mRNA as the first and second guide strand sequences and a third passenger strand sequence comprising a contiguous 19 nucleotide sequence that is at least 78% complementary to the third guide strand sequence, wherein the third guide strand and third passenger strand sequences are separated by between 5 and 35 nucleotides, and wherein the first, second and third guide strand sequences are different from each other.

6. The polynucleotide of any preceding claim, further comprising two transposon ends flanking the segment and the promoter, wherein the segment and the promoter are transposable by a corresponding transposase.

7. The polynucleotide of claim 6, wherein each transposon end comprises a sequence selected from SEQ ID NOs: 421 and 422, or from SEQ ID NOs: 427 and 428, or from SEQ ID NOs: 431 and 432, or from SEQ ID NOs: 433 and 434, or from SEQ ID NOs: 439 and 440, or from SEQ ID NOs: 443 and 444, or from SEQ ID NOs: 447 and 564, or from SEQ ID NOs: 452 and 453, or from SEQ ID NOs: 460 and 461, or from SEQ ID NOs: 528 and 529.

8. The polynucleotide of claim 1, wherein the polynucleotide comprises a sequence selected from SEQ ID NO: 210 and 627.

9. A mammalian cell comprising the polynucleotide of any preceding claim integrated into its genome.

10. The mammalian cell of claim 9, wherein the multi-hairpin amiRNA sequence is expressed and inhibits expression of the natural cellular mRNA, and whereby the growth of the cell in the presence of 50 nM methotrexate cell is inhibited relative to the growth of an otherwise identical cell whose genome does not comprise the multi-hairpin amiRNA.

11. A mammalian cell comprising
a) the polynucleotide of any one of claims 1-8 integrated into its genome, wherein the multi-hairpin amiRNA sequence is expressed and inhibits expression of the natural cellular mRNA and
b) a second polynucleotide comprising a gene encoding dihydrofolate reductase expressible in the mammalian cell, wherein expression of the gene compensates for the inhibition of the expression of the natural cellular mRNA, whereby the cell grows without the exogenous provision of hypoxanthine and thymidine and in the presence of at least 10 nM methotrexate.

12. The mammalian cell of claim 11, wherein the second polynucleotide further comprises a second gene expressible in the mammalian cell.

13. A method of selecting for integration of a nucleic acid encoding a target protein into the genome of a cell comprising;
a) culturing a population of mammalian cells according to claim 11 or 12 in the presence of hypoxanthine and thymidine required by the cell to grow due to inhibition of expression of the natural cellular mRNA by the multi-hairpin amiRNA sequence;
b) transfecting the population of cells with a second polynucleotide comprising a gene encoding a dihydrofolate reductase expressible in the mammalian cells and a second gene encoding the target protein, wherein expression of the dihydrofolate reductase compensates for the inhibition of the expression of the natural cellular mRNA thereby restoring capacity to grow without hypoxanthine and thymidine and in the presence of at least 10 nM methotrexate;
c) culturing the transfected cells with a reduced concentration or absence of the hypoxanthine and thymidine, and optionally the presence of between 10 nM and 2 uM methotrexate wherein transfected cells surviving culturing have integrated the second polynucleotide into their genomes and can thereby express the target protein.
Synthetic amiRNA UTR

14. A polynucleotide comprising
a) an open reading frame operably linked to a first promoter that is active in a eukaryotic cell,
b) a polyadenylation signal sequence that is active in a eukaryotic cell,
c) a sequence selected from SEQ ID NOs: 558-561, located between the open reading frame and the polyadenylation signal sequence,
wherein the open reading frame does not encode Cricetulus griseus alpha-(1,6)-fucosyl transferase or Cricetulus griseus glutamine synthetase.

15. A method of inhibiting expression of an open reading frame in a eukaryotic cell, comprising introducing into the eukaryotic cell (i) the polynucleotide of claim 14 and (ii) a polynucleotide encoding a multi-hairpin amiRNA comprising a sequence selected from SEQ ID NOs: 193, 194, 195 and 209 or the multi-hairpin amiRNA, wherein the multi-hairpin amiRNA inhibits expression of the open reading frame.

16. The method of claim 15, wherein the polynucleotide encoding the multi-hairpin amiRNA is operably linked to a second promoter that is active in the cell.

17. The method of claim 16, wherein the second promoter is inducible.

18. The method of claim 16, wherein the second promoter is constitutive.

19. The method of any one of claims 15-18, wherein the eukaryotic cell is a mammalian cell.

20. The method of any one of claims 15-18, wherein the eukaryotic cell is a human cell.

21. The method of any one of claims 15-18, wherein the eukaryotic cell is a rodent cell.

22. A cell comprising (i) the polynucleotide of claim 14 and (ii) a polynucleotide encoding a multi-hairpin amiRNA comprising a sequence selected from SEQ ID NOs: 193, 194, 195 and 209 or the multi-hairpin amiRNA.
General Multi-Hairpin amiRNA

23. A polynucleotide comprising
a) a segment encoding a multi-hairpin amiRNA sequence, wherein the segment comprises
i) a first guide strand sequence comprising a contiguous 19 nucleotide sequence that is perfectly complementary to a first target site of a natural mammalian cellular mRNA and a first passenger strand sequence comprising a contiguous 19 nucleotide sequence that is at least 78% complementary to the first guide strand sequence, wherein the first guide strand and first passenger strand sequence are separated by between 5 and 35 nucleotides;
ii) a second guide strand sequence comprising a contiguous 19 nucleotide sequence that is perfectly complementary to a second target site different than the first target site of the same natural mammalian cellular mRNA as the first guide strand sequence and a second passenger strand sequence comprising a contiguous 19 nucleotide sequence that is at least 78% complementary to the second guide strand sequence, wherein the second guide strand and second passenger strand sequence are separated by between 5 and 35 nucleotides, and wherein the first and second guide strand sequence are different from each other; and
b) a eukaryotic promoter that is active in a mammalian cell and is transcribed by RNA polymerase II or RNA polymerase III, operably linked to the segment encoding the amiRNA sequence, wherein the amiRNA sequence can be expressed and fold into multiple hairpins.

24. The polynucleotide of claim 23, wherein the multi-hairpin amiRNA sequence reduces expression of the natural cellular mRNA to a greater extent than a control polynucleotide expressing tandem copies of the amiRNA hairpin comprising the first guide strand sequence, or a control polynucleotide expressing tandem copies of the amiRNA hairpin comprising the second guide strand sequence of the polynucleotide of claim 23.

25. The polynucleotide of claim 23 or 24, wherein the first guide strand sequence is a 19-22 nucleotide sequence perfectly complementary to the natural mammalian cellular mRNA and the first passenger strand sequence has the same length as the first guide sequence.

26. The polynucleotide of claim 23 or 24, wherein the first guide strand sequence is a 19-22 nucleotide sequence perfectly complementary to the natural mammalian cellular mRNA and the first passenger strand sequence is shorter than the first guide sequence.

27. The polynucleotide of any one of claims 23-26, wherein the first and second target sites do not overlap.

28. The polynucleotide of any one of claims 23-27, wherein the segment encoding the multi-hairpin amiRNA sequence further comprises a third guide strand sequence comprising a contiguous 19 nucleotide sequence that is perfectly complementary to the same natural mammalian cellular mRNA as the first and second guide strand sequences and a third passenger strand sequence comprising a contiguous 19 nucleotide sequence that is at least 78% complementary to the third guide strand sequence, wherein the third guide strand and third passenger strand sequence are separated by between 5 and 35 nucleotides, and wherein the first, second and third guide strand sequences are different from each other.

29. The polynucleotide of any one of claims 23-28, further comprising two transposon ends flanking the multi-hairpin amiRNA segment and the promoter, wherein the segment and the promoter are transposable by a corresponding transposase.

30. The polynucleotide of claim 29, wherein each transposon end comprises a sequence selected from SEQ ID NOs: 421 and 422, or from SEQ ID NOs: 427 and 428, or from SEQ ID NOs: 431 and 432, or from SEQ ID NOs: 433 and 434, or from SEQ ID NOs: 439 and 440, or from SEQ ID NOs: 443 and 444, or from SEQ ID NOs: 564 and 447, or from SEQ ID NOs: 452 and 453, or from SEQ ID NOs: 456 and 457, or from SEQ ID NOs: 460 and 461, or from SEQ ID NOs: 528 and 529.

31. The polynucleotide of any one of claims 23-30, further comprising an open reading frame operably linked to the promoter, wherein the multi-hairpin amiRNA sequence is expressed from the promoter in a 3′ UTR following the open reading frame.

32. The polynucleotide of claim 31, wherein the open reading frame encodes a selectable marker.

33. The polynucleotide of claim 31, wherein the open reading frame encodes a fluorescent protein.

34. The polynucleotide of claim 32, wherein the selectable marker provides a growth advantage to the cell either by allowing the cell to synthesize a metabolically useful substance, or to survive in the presence of a harmful substance such as an antibiotic, enzyme inhibitor or cellular poison.

35. The polynucleotide of claim 32, wherein the selectable marker is selected from a dihydrofolate reductase, a glutamine synthetase, an aminoglycoside 3′-phosphotransferase, a puromycin acetyltransferase, a blasticidin acetyltransferase, a blasticidin deaminase, a hygromycin B phosphotransferase or a zeocin-binding protein.

36. The polynucleotide of any one of claims 23-35, wherein the promoter is an EF1a promoter, a promoter from the immediate early genes 1, 2 or 3 of cytomegalovirus, a promoter for eukaryotic elongation factor 2, a glyceraldehyde 3-phosphate dehydrogenase promoter, an actin promoter, a phosphoglycerokinase promoter, a ubiquitin promoter, a herpes simplex virus thymidine kinase promoter or a simian virus 40 promoter.

37. The polynucleotide of any one of claims 23-35, wherein the promoter is at least 95% identical to a nucleotide sequence selected from SEQ ID NOs: 310-399 and 404-409

38. The polynucleotide of any one of claims 23-37, wherein each passenger strand sequence is not complementary to its corresponding guide strand sequence at the position corresponding to the first base of the guide strand sequence.

39. The polynucleotide of any one of claims 23-38, wherein each passenger strand sequence is not complementary to its corresponding guide strand sequence at the position corresponding to the twelfth base of the guide strand sequence.

40. The polynucleotide of any one of claims 23-39, wherein each 5-35 nucleotide unstructured loop sequence between a guide strand sequence and its corresponding passenger strand sequence comprises a sequence selected from SEQ ID NOs: 241-250.

41. The polynucleotide of any one of claims 23-40, wherein each guide strand-passenger strand hairpin further comprises additional sequences immediately to the 5′ and 3′ of the hairpin, wherein the additional sequence are SEQ ID NO: 255 to the 5′ and SEQ ID NO: 256 to the 3′, or SEQ ID NO: 257 to the 5′ and SEQ ID NO: 258 to the 3′, or SEQ ID NO: 259 to the 5′ and SEQ ID NO: 260 to the 3′, or SEQ ID NO: 261 to the 5′ and SEQ ID NO: 262 to the 3′, or SEQ ID NO: 263 to the 5′ and SEQ ID NO: 264 to the 3′, or SEQ ID NO: 265 to the 5′ and SEQ ID NO: 266 to the 3′, or SEQ ID NO: 267 to the 5′ and SEQ ID NO: 268 to the 3′, or SEQ ID NO: 269 to the 5′ and SEQ ID NO: 270 to the 3′.

42. The polynucleotide of any one of claims 23-41, wherein the polynucleotide is integrated into the genome of a mammalian cell.

43. The polynucleotide of claim 23, which is effective to reduce expression of a target gene encoding the mRNA, or the function or the activity of the mRNA or a protein expressed therefrom, to less than 20% of the level in a control mammalian cell in which the polynucleotide is not expressed.

44. The polynucleotide of claim 42 or 43, wherein the mammalian cell is a hamster cell.

45. The polynucleotide of claim 42 or 43, wherein the mammalian cell is a human cell.

46. The mammalian cell of claim 42.

47. The mammalian cell of claim 46, wherein the expression of the target gene or the function or the activity of the product of the target gene is reduced to less than 20% of its normal level, compared with an equivalent mammalian cell whose genome does not comprise the polynucleotide.
Sialidase amiRNA

48. A polynucleotide comprising
a) a segment encoding a multi-hairpin amiRNA sequence, wherein the segment comprises
i) a first guide strand sequence comprising a contiguous 19 nucleotide sequence that is perfectly complementary to a first target site of a natural mammalian cellular mRNA and a first passenger strand sequence comprising a contiguous 19 nucleotide sequence that is at least 78% complementary to the first guide strand sequence, wherein the first guide strand and first passenger strand sequence are separated by between 5 and 35 nucleotides;
ii) a second guide strand sequence comprising a contiguous 19 nucleotide sequence that is perfectly complementary to a second target site different than the first target site of the same natural mammalian cellular mRNA as the first guide strand sequence and a second passenger strand sequence comprising a contiguous 19 nucleotide sequence that is at least 78% complementary to the second guide strand sequence, wherein the second guide strand and second passenger strand sequence are separated by between 5 and 35 nucleotides, and wherein the first and second guide strand sequence are different from each other; and
b) a eukaryotic promoter that is active in a mammalian cell and is transcribed by RNA polymerase II or RNA polymerase III, operably linked to the segment encoding the amiRNA sequence, wherein the amiRNA sequence can be expressed and fold into multiple hairpins;
wherein the natural mammalian cellular mRNA encodes an enzyme that reduces protein sialylation.

49. The polynucleotide of claim 48, wherein the natural mammalian cellular mRNA encodes a sialidase.

50. The polynucleotide of claim 49, wherein the natural mammalian cellular mRNA comprises a sequence that is at least 98% identical to a sequence selected from SEQ ID NOs: 13-18 or from SEQ ID NOs: 570-571.

51. The polynucleotide of claim 49, wherein the first and second guide strand sequences are selected from SEQ ID NOs: 85-89 or 565.

52. The polynucleotide of claim 49, wherein the first and second guide strand sequences are selected from SEQ ID NOs: 90-94.

53. The polynucleotide of claim 49, wherein the polynucleotide comprises a sequence selected from SEQ ID NOs: 212-225 or 567-569 comprising or encoding the multi-hairpin amiRNA sequence.
Sialidase Method

54. A method for increasing sialylation in a mammalian cell, comprising introducing into the mammalian cell
a) the polynucleotide of any one of claims 49-53 flanked by transposon ends; and
b) a corresponding transposase, wherein the transposase integrates the polynucleotide into the genome of the mammalian cell, whereby the mammalian cell produces a secreted protein with an increased level of sialylation relative to a control cell whose genome lacks the polynucleotide.

55. The method of claim 54, wherein the corresponding transposase is introduced as a polynucleotide encoding the transposase.

56. The method of claim 55, wherein the polynucleotide encoding the transposase is an mRNA.

57. The method of claim 55, wherein the polynucleotide encoding the transposase is DNA, and comprises an open reading frame encoding the transposase operably linked to a promoter active in the mammalian cell.

58. The method of claim 54, wherein the transposase is provided as transposase protein.

59. The method of any one of claims 54-58, wherein the genome of the mammalian cell further comprises a heterologous polynucleotide encoding the secreted protein, and the secreted protein is not naturally produced by the cell.

60. The method of any one of claims 54-59, further comprising
a) introducing into the cell the heterologous polynucleotide encoding the secreted protein, wherein the secreted protein is not naturally produced by the cell

61. The method of claim 60, wherein the polynucleotide of (a) is introduced into the cell before the polynucleotide of (c).

62. The method of claim 60, wherein the polynucleotide of (c) is introduced into the cell before the polynucleotide of (a).

63. The method of claim 60, wherein the polynucleotide of (a) is introduced into the cell at the same time as the polynucleotide of (c).

64. The method of claim 60, wherein the polynucleotide of (a) is carried on the same DNA molecule as the polynucleotide of (c).

65. The method of any one of claims 54-64, further comprising purifying the secreted protein.

66. The method of any one of claims 54-65, further comprising identifying the cell with the polynucleotide integrated into its genome.

67. The method of any one of claims 54-66, wherein the mammalian cell is a human cell

68. The method of any one of claims 54-66, wherein the mammalian cell is a CHO cell.

69. A mammalian cell produced by the method of any one of claims 54-68.

70. A mammalian cell comprising the polynucleotide of any one of claims 48-53, wherein the polynucleotide is expressed to produce the multi-hairpin amiRNA sequence, which inhibits expression of the enzyme that reduces protein sialylation.

71. The mammalian cell of claim 70, further comprising a heterologous polynucleotide encoding a secreted protein not naturally produced by the cell, wherein sialylation of the secreted protein is increased compared with expression in a control cell lacking the polynucleotide expressed to produce the amiRNA sequence.
LPL amiRNA

72. A polynucleotide comprising
a) a segment encoding a multi-hairpin amiRNA sequence, wherein the segment comprises
i) a first guide strand sequence comprising a contiguous 19 nucleotide sequence that is perfectly complementary to a first target site in a natural mammalian cellular mRNA of SEQ ID NO: 22 and a first passenger strand sequence comprising a contiguous 19 nucleotide sequence that is at least 78% complementary to the first guide strand sequence, wherein the first guide strand and first passenger strand sequence are separated by between 5 and 35 nucleotides;
ii) a second guide strand sequence comprising a contiguous 19 nucleotide sequence that is perfectly complementary to a second target site different than the first target site in the same natural mammalian cellular mRNA as the first guide strand sequence and a second passenger strand sequence comprising a contiguous 19 nucleotide sequence that is at least 78% complementary to the second guide strand sequence, wherein the second guide strand and second passenger strand sequences are separated by between 5 and 35 nucleotides, and wherein the first and second guide strand sequences are different from each other; and
b) a eukaryotic promoter that is active in a mammalian cell and is transcribed by RNA polymerase II or RNA polymerase III operably linked to the segment encoding the amiRNA sequence, wherein the amiRNA sequence can be expressed and fold into multiple hairpins;
wherein the natural mammalian cellular mRNA encodes a fatty acid hydrolase.

73. The polynucleotide of claim 72, wherein the natural mammalian cellular mRNA comprises a sequence that is at least 98% identical to SEQ ID NO: 572 or 590-592.

74. The polynucleotide of claim 73, wherein the first and second guide strand sequences are selected from SEQ ID Nos: 573-578.

75. The polynucleotide of claim 73, wherein the polynucleotide comprises a sequence selected from SEQ ID NOs: 585-589.
LPL Method

76. A method for reducing lipoprotein lipase in a mammalian cell, comprising introducing into a mammalian cell
a) the polynucleotide of any one of claims 72-75; and
b) a corresponding transposase, wherein the transposase integrates the polynucleotide into the genome of the cell, wherein expression of lipoprotein lipase is reduced.

77. The method of claim 76, wherein a level of the lipoprotein contaminating a secreted protein produced by the cell is reduced.

78. The method of claim 76 or 77, wherein the corresponding transposase is introduced as a polynucleotide encoding the transposase.

79. The method of claim 78, wherein the polynucleotide encoding the transposase is an mRNA.

80. The method of claim 78, wherein the polynucleotide encoding the transposase is DNA, and comprises an open reading frame encoding the transposase that is operably linked to a promoter that is active in the mammalian cell.

81. The method of claim 76, wherein the transposase is provided as a transposase protein.

82. The method of any one of claims 76-81, wherein the genome of the mammalian cell further comprises a gene encoding the secreted protein, and the secreted protein is not naturally produced by the cell.

83. The method of claim 77, further comprising:
c) introducing into the cell the gene encoding the secreted protein.

84. The method of claim 83, wherein the polynucleotide of (a) is introduced into the cell before the gene of (c).

85. The method of claim 83, wherein the gene of (c) is introduced into the cell before the polynucleotide of (a).

86. The method of claim 83, wherein the polynucleotide of (a) is introduced into the cell at the same time as the gene of (c).

87. The method of claim 86, wherein the polynucleotide of (a) is carried on the same DNA molecule as the gene of (c).

88. The method of any one of claims 77-87, further comprising purifying the secreted protein.

89. The method of claim 76, further comprising identifying a cell whose genome comprises the polynucleotide of claim 72.

90. The method of any one of claims 76-89, wherein the mammalian cell is a CHO cell.

91. A mammalian cell produced by the method of any one of claims 76-90.
IFN amiRNA

92. The polynucleotide of any one of claims 23-45, wherein the natural mammalian cellular mRNA encodes a subunit of an interferon receptor.

93. The polynucleotide of claim 92, wherein the natural mammalian cellular mRNA comprises a sequence that is at least 98% identical to a sequence selected from SEQ ID NOs: 19-22.

94. The polynucleotide of claim 92, wherein the first and second guide strand sequences are selected from SEQ ID NOs: 95-101.

95. The polynucleotide of claim 92, wherein the first and second guide strand sequences are selected from SEQ ID NOs: 102-107.

96. The polynucleotide of claim 92, wherein the polynucleotide comprises a sequence selected from SEQ ID NOs: 226-240.

97. The polynucleotide of any one of claims 92-96, further comprising an open reading frame encoding an interferon polypeptide, operably linked to a promoter active in a mammalian cell.
IFN Method

98. A method for reducing expression of an interferon receptor in a mammalian cell, comprising introducing into the mammalian cell
a) the polynucleotide of any one of claims 92-97 flanked by transposon ends; and
b) a corresponding transposase, wherein the transposase integrates the polynucleotide into the genome of the cell, and the polynucleotide expresses an amiRNA that reduces expression of the interferon receptor.

99. The method of claim 98, wherein the corresponding transposase is introduced as a polynucleotide encoding the transposase.

100. The method of claim 99, wherein the polynucleotide encoding the transposase is an mRNA.

101. The method of claim 99, wherein the polynucleotide encoding the transposase is DNA, and comprises an open reading frame encoding the transposase that is operably linked to a promoter that is active in the mammalian cell.

102. The method of claim 98, wherein the transposase is provided as transposase protein.

103. The method of any one of claims 98-102, wherein the genome of the mammalian cell further comprises a heterologous polynucleotide encoding an interferon polypeptide, expressible in the cell.

104. The method of claim 103, further comprising
a) introducing into the cell the heterologous polynucleotide encoding the interferon polypeptide.

105. The method of claim 104, wherein the polynucleotide of (a) is introduced into the cell before the polynucleotide of (c).

106. The method of claim 104, wherein the polynucleotide of (c) is introduced into the cell before the polynucleotide of (a).

107. The method of claim 104, wherein the polynucleotide of (a) is introduced into the cell at the same time as the polynucleotide of (c).

108. The method of claim 104, wherein the polynucleotide of (a) is carried on the same DNA molecule as the polynucleotide of (c).

109. The method of any one of claims 103-108, further comprising purifying the interferon.

110. The method of any one of claims 98-109, further comprising identifying the cell whose genome comprises the polynucleotide that expresses an amiRNA that reduces expression of an interferon receptor.

111. The method of any one of claims 98-110, wherein the mammalian cell is a human cell.

112. The method of any one of claims 98-110, wherein the mammalian cell is a CHO cell.

113. The mammalian cell produced by the method of any one of claims 98-112.

114. A mammalian cell comprising the polynucleotide of any one of claims 92-97, wherein the polynucleotide is expressed to produce the multi-hairpin amiRNA sequence, which inhibits expression of the subunit of the interferon receptor.

115. The mammalian cell of claim 114 further comprising a heterologous polynucleotide encoding an interferon, which is expressed with reduced toxicity to the cell compared with a control cell lacking the polynucleotide expressed to produce the amiRNA sequence.
Modification of gene to include target sites for amiRNA

116. A method of inhibiting expression of a gene in a mammalian cell, comprising modifying the mammalian cell so it expresses an mRNA encoded by the gene fused to a segment including first and second target sites different from each other; introducing in the mammalian cell a polynucleotide comprising
a) a segment encoding a multi-hairpin amiRNA sequence, wherein the segment comprises
i) a first guide strand sequence comprising a contiguous 19 nucleotide sequence that is perfectly complementary to the first target site and a first passenger strand sequence comprising a contiguous 19 nucleotide sequence that is at least 78% complementary to the first guide strand sequence, wherein the first guide strand and first passenger strand sequence are separated by between 5 and 35 nucleotides;
ii) a second guide strand sequence comprising a contiguous 19 nucleotide sequence that is perfectly complementary to the second target site and a second passenger strand sequence comprising a contiguous 19 nucleotide sequence that is at least 78% complementary to the second guide strand sequence, wherein the second guide strand and second passenger strand sequence are separated by between 5 and 35 nucleotides, and wherein the first and second guide strand sequence are different from each other; and
b) a eukaryotic promoter that is active in a mammalian cell and is transcribed by RNA polymerase II or RNA polymerase III, operably linked to the segment encoding the amiRNA sequence, wherein the amiRNA sequence can be expressed and fold into multiple hairpins, wherein the multi-hairpin amiRNA sequence binds to the first and second target sites via the first and second guide strand sequences inhibiting expression of the gene.

117. The method of claim 116, wherein the segment including the first and second target sites is fused within the 3′ UTR of the mRNA.

The application's sequence listing, which the Patent Office published only in electronic form, follows.

SEQUENCE LISTING (637 sequences)

SEQ ID NO: 1 - DNA, 2824 bp, Artificial sequence
  Synthetic sequence
ttcaggttgctgctctggcttaggccatctatgaccctggtggtgttttcattcactataagtccttcccatctttattaactgagcaagttcagctagtaattttagagaccgaggttcaagcaataacacctatctctgcaataccgtgtggctttcttcaatgtcttacatcctaaggaaaggaagcatgtagagcccaggaagcacaggacaagaaagctgcctccttgtatcaccaggaagatctttttgtaagagtcatcacagtataccagagagactaattttgtctgaagcatcatgtgttgaaacaacagaaacttattttcctgtgtggctaactagaaccagagtacaatgtttccaattctttgagctccgagaagacagaagggagttgaaactctgaaaatgcgggcatggactggttcctggcgttggattatgctcattctttttgcctgggggaccttattgttttatataggtggtcatttggttcgagataatgaccaccctgaccattctagcagagaactctccaagattcttgcaaagctggagcgcttaaaacaacaaaatgaagacttgaggagaatggctgagtctctccgaataccagaaggccctattgatcaggggacagctacaggaagagtccgtgttttagaagaacagcttgttaaggccaaagaacagattgaaaattacaagaaacaagctaggaatgatctgggaaaggatcatgaaatcttaaggaggaggattgaaaatggagctaaagagctctggttttttctacaaagtgaattgaagaaattaaagaaattagaaggaaacgaactccaaagacatgcagatgaaattcttttggatttaggacatcatgaaaggtctatcatgacagatctatactacctcagtcaaacagatggagcaggtgagtggcgggaaaaagaagccaaagatctgacagagctggtccagcggagaataacatatctgcagaatcccaaggactgcagcaaagccagaaagctggtatgtaatatcaacaaaggctgtggctatggatgtcaactccatcatgtggtttactgcttcatgattgcttatggcacccagcgaacactcatcttggaatctcagaattggcgctatgctactggaggatgggagactgtgtttagacctgtaagtgagacatgcacagacaggtctggcctctccactggacactggtcaggtgaagtgaaggacaaaaatgttcaagtggtcgagctccccattgtagacagcctccatcctcgtcctccttacttacccttggctgtaccagaagaccttgcagatcgactcctgagagtccatggtgatcctgcagtgtggtgggtatcccagtttgtcaaatacttgatccgtccacaaccttggctggaaagggaaatagaagaaaccaccaagaagcttggcttcaaacatccagttattggagtccatgtcagacgcactgacaaagtgggaacagaagcagccttccatcccattgaggaatacatggtacacgttgaagaacattttcagcttctcgaacgcagaatgaaagtggataaaaaaagagtgtatctggccactgatgacccttctttgttaaaggaggcaaagacaaagtactccaattatgaatttattagtgataactctatttcttggtcagctggactacacaaccgatacacagaaaattcacttcggggcgtgatcctggatatacactttctctcccaggctgacttccttgtgtgtactttttcatcccaggtctgtagggttgcttatgaaatcatgcaaacactgcatcctgatgcctctgcaaacttccattctttagatgacatctactattttggaggccaaaatgcccacaaccagattgcagtttatcctcaccaacctcgaactaaagaggaaatccccatggaacctggagatatcattggtgtggctggaaaccattggaatggttactctaaaggtgtcaacagaaaactaggaaaaacaggcctgtacccttcctacaaagtccgagagaagatagaaacagtcaaataccctacatatcctgaagctgaaaaatagagatggagtgtaagagattaacaacagaatttagttcagaccatctcagccaagcagaagacccagactaacatatggttcattgacagacatgctccgcaccaagagcaagtgggaaccctcagatgctgcactggtggaacgcctctttgtgaagggctgctgtgccctcaagcccatgcacagtaaaataatgtactcacacataacatacaaatggattattttctactttgccctttaaatattctgtccccatgaaacaaacactgccacattatgtaatttaagtgacacagacgttttgtgtgagacttcaaacatggtgcctatatctgagagacctctgtgatttactgagaagatgagaacagctcccttctgtggggaagttggttcttagtcagtggtggactggccactgaattcactgcaatcaacagattcagaatgagaatggatgtttttcctttatatggttgtctggattttttttaaagtaatttcatcagttcagttcatccacctcattaataaatgaaggaatataccaataaaatcaaatgaaatattcactgtccattaggaagttttataaaacaatgccatgaacaaaaaattctttagtactcaatgtttctggacattctctttgataacaaaaataaattttaaaaaggaa

SEQ ID NO: 2 - DNA, 682 bp, Artificial sequence
  Synthetic sequence
agatggagtgtaagagattaacaacagaatttagttcagaccatctcagccaagcagaagacccagactaacatatggttcattgacagacatgctccgcaccaagagcaagtgggaaccctcagatgctgcactggtggaacgcctctttgtgaagggctgctgtgccctcaagcccatgcacagtaaaataatgtactcacacataacatacaaatggattattttctactttgccctttaaatattctgtccccatgaaacaaacactgccacattatgtaatttaagtgacacagacgttttgtgtgagacttcaaacatggtgcctatatctgagagacctctgtgatttactgagaagatgagaacagctcccttctgtggggaagttggttcttagtcagtggtggactggccactgaattcactgcaatcaacagattcagaatgagaatggatgtttttcctttatatggttgtctggattttttttaaagtaatttcatcagttcagttcatccacctcattaataaatgaaggaatataccaataaaatcaaatgaaatattcactgtccattaggaagttttataaaacaatgccatgaacaaaaaattctttagtactcaatgtttctggacattctctttgataacaaaaataaattttaaaaaggaa

SEQ ID NO: 3 - DNA, 1586 bp, Artificial sequence
  Synthetic sequence
agactgtggcggccgctgcagctccgtgaggcgactggcgcgcgcacccacgtctctgtcggcccgctgccggttccacggttccactcctccttccactcggctgcacgctcacccgcccgcggcgacatggctcacgctcccgctagctgcccgagctccaggaactctggggacggcgataagggcaagcccaggaaggtggcgctcatcacgggcatcaccggccaggatggctcatacttggcagaattcctgctggagaaaggatacgaggttcatggaattgtacggcgatccagttcatttaatacaggtcgaattgaacatttatataagaatccacaggctcatattgaaggaaacatgaagttgcactatggtgacctcaccgacagcacctgcctagtaaaaatcatcaatgaagtcaaacctacagagatctacaatcttggtgcccagagccatgtcaagatttcctttgacttagcagagtacactgcagatgttgatggagttggcaccttgcggcttctggatgcaattaagacttgtggccttataaattctgtgaagttctaccaggcctcaactagtgaactgtatggaaaagtgcaagaaataccccagaaagagaccacccctttctatccaaggtcgccctatggagcagccaaactttatgcctattggattgtagtgaactttcgagaggcttataatctctttgcggtgaacggcattctcttcaatcatgagagtcctagaagaggagctaattttgttactcgaaaaattagccggtcagtagctaagatttaccttggacaactggaatgtttcagtttgggaaatctggacgccaaacgagactggggccatgccaaggactatgtcgaggctatgtggctgatgttacaaaatgatgaaccagaggactttgtcatagctactggggaagttcatagtgtccgtgaatttgttgagaaatcattcatgcacattggaaagaccattgtgtgggaaggaaagaatgaaaatgaagtgggcagatgtaaagagaccggcaaaattcatgtgactgtggatctgaaatactaccgaccaactgaagtggacttcctgcagggagactgctccaaggcgcagcagaaactgaactggaagccccgcgttgcctttgacgagctggtgagggagatggtgcaagccgatgtggagctcatgagaaccaaccccaacgcctgagcacctctacaaaaaattcgcgagacatggactatggtgcagagccagccaaccagagtccagccactcctgagaccatcgaccataaaccctcgactgcctgtgtcgtccccacagctaagagctgggccacaggtttgtgggcaccaggacggggacactccagagctaaggccacttcgcttttgtcaaaggctcctctgaatgattttgggaaatcaagaagtttaaaatcacatactcattttacttgaaattatgtcactagacaacttaaatttttgagtcttgagattgtttttctcttttcttattaaatgatctttctatgaaccagc

SEQ ID NO: 4 - DNA, 338 bp, Artificial sequence
  Synthetic sequence
gcacctctacaaaaaattcgcgagacatggactatggtgcagagccagccaaccagagtccagccactcctgagaccatcgaccataaaccctcgactgcctgtgtcgtccccacagctaagagctgggccacaggtttgtgggcaccaggacggggacactccagagctaaggccacttcgcttttgtcaaaggctcctctgaatgattttgggaaatcaagaagtttaaaatcacatactcattttacttgaaattatgtcactagacaacttaaatttttgagtcttgagattgtttttctcttttcttattaaatgatctttctatgaaccagc

SEQ ID NO: 5 - DNA, 2658 bp, Artificial sequence
  Synthetic sequence
ggaagtcgtactggggagggccgcgtagcagatgcagccgagggcggcgctgccaggtacacccgagggcaccgcgggggtgagcgccaggtccctgaaccagccaggcctccagagccgagtccggcggaccgacgggcccctctgaagcggtccaggatcctgcgcatggcgctgactggaggctccactgcctctgaggaggcagatgaagacagcaggaacaagccgtttctgctgcgggcgctgcagatcgcgctggtcgtctctctctactgggtcacctccatctccatggtattcctcaacaagtacctgctggacagcccctccctgcagctggatacccctatcttcgtcactttctaccaatgcctggtgacctctctgctgtgcaagggcctcagcactctggccacctgctgccctggcaccgttgacttccccaccctgaacctggaccttaaggtggcccgcagcgtgctgccactgtcggtagtcttcattggcatgataagtttcaataacctctgcctcaagtacgtaggggtggccttctacaacgtggggcgctcgctcaccaccgtgttcaatgtgcttctgtcctacctgctgctcaaacagaccacttccttctatgccctgctcacatgtggcatcatcattggtggtttctggctgggtatagaccaagagggagctgagggcaccctgtccctcataggcaccatcttcggggtgctggccagcctctgcgtctccctcaatgccatctataccaagaaggtgctcccagcagtggacaacagcatctggcgcctaaccttctataacaatgtcaatgcctgtgtgctcttcttgcccctgatggttctgctgggtgagctccgtgccctccttgactttgctcatctgtacagtgcccacttctggctcatgatgacgctgggtggcctcttcggctttgccattggctatgtgacaggactgcagatcaaattcaccagtcccctgacccacaatgtatcaggcacagccaaggcctgtgcgcagacagtgctggccgtgctctactatgaagagactaagagcttcctgtggtggacaagcaacctgatggtgctgggtggctcctcagcctatacctgggtcaggggctgggagatgcagaagacccaagaggaccccagctccaaagagggtgagaagagtgctattggggtgtgagcttcttcagggacctgggactgaacccaagtggggcctacacagcactgaaggcttcccatggagctagccagtgtggccctgagcaatactgtttacatcctccttggaatatgatctaagaggagccagggtctttcctggtaatgtcagaaagctgccaaatctcctgtctgccccatcttgttttgggaaaaccctaccaggaatggcacccctacctgcctcctcctagagcctgtctacctccatatcatctctggggttgggaccagctgcagccttaaggggctggattgatgaagtgatgtcttctacacaagggagatgggttgtgatcccactaattgaagggatttgggtgaccccacacctctgggatccagggcaggtagagtagtagcttaggtgctattaacatcaggaacacctcagcctgcctttgaagggaagtgggagcttggccaagggaggaaatggccattctgccctcttcagtgtggatgagtatggcagacctgttcatggcagctgcaccctggggtggctgataagaaaacattcacctctgcatttcatatttgcagctctagaacgggggagagccacacatcttttacgggttaagtagggtgatgagctcctccgcagtccctaaccccagctttacctgcctggcttcccttggcccagctacctagctgtactccctttctgtactcttctcttctccgtcatggcctcccccaacacctccatctgcaggcaggaagtggagtccacttgtaacctctgttcccatgacagagccctttgaatacctgaacccctcatgacagtaagagacatttatgttctctggggctggggctgaaggagcccactggttctcacttagcctatctggctcctgtcacaaaaaaaaaaaaagaaaaaaaaaaagcataaaccaagttactaagaacagaagttggtttataacgttctggggcagcaaagcccagatgaagggacccatcgaccctctctgtccatatcctcatgctgcagaagtacaggcaagctcctttaagcctcatataggaacactagcctcactcatgagggttttactccatgacctgtcaacctcaaagccttcaacatgaggactccaacgtaaatttggggacagaagcactcagaccataaccccagcaccacaccctcctaacctcagggtagctgtcattctcctagtctcctctcttgggcctttagaacccccatttccttggggtaatgtctgatgtttttgtccctgtcataaaaagatggagagactgtgtccagcctttgattcctacttcctacaatcccaggttctaatgaagtttgtggggcctgatgccctgagttgtatgtgatttaataataaaaaagcaagataca

SEQ ID NO: 6 - DNA, 1431 bp, Artificial sequence
  Synthetic sequence
gcttcttcagggacctgggactgaacccaagtggggcctacacagcactgaaggcttcccatggagctagccagtgtggccctgagcaatactgtttacatcctccttggaatatgatctaagaggagccagggtctttcctggtaatgtcagaaagctgccaaatctcctgtctgccccatcttgttttgggaaaaccctaccaggaatggcacccctacctgcctcctcctagagcctgtctacctccatatcatctctggggttgggaccagctgcagccttaaggggctggattgatgaagtgatgtcttctacacaagggagatgggttgtgatcccactaattgaagggatttgggtgaccccacacctctgggatccagggcaggtagagtagtagcttaggtgctattaacatcaggaacacctcagcctgcctttgaagggaagtgggagcttggccaagggaggaaatggccattctgccctcttcagtgtggatgagtatggcagacctgttcatggcagctgcaccctggggtggctgataagaaaacattcacctctgcatttcatatttgcagctctagaacgggggagagccacacatcttttacgggttaagtagggtgatgagctcctccgcagtccctaaccccagctttacctgcctggcttcccttggcccagctacctagctgtactccctttctgtactcttctcttctccgtcatggcctcccccaacacctccatctgcaggcaggaagtggagtccacttgtaacctctgttcccatgacagagccctttgaatacctgaacccctcatgacagtaagagacatttatgttctctggggctggggctgaaggagcccactggttctcacttagcctatctggctcctgtcacaaaaaaaaaaaaagaaaaaaaaaaagcataaaccaagttactaagaacagaagttggtttataacgttctggggcagcaaagcccagatgaagggacccatcgaccctctctgtccatatcctcatgctgcagaagtacaggcaagctcctttaagcctcatataggaacactagcctcactcatgagggttttactccatgacctgtcaacctcaaagccttcaacatgaggactccaacgtaaatttggggacagaagcactcagaccataaccccagcaccacaccctcctaacctcagggtagctgtcattctcctagtctcctctcttgggcctttagaacccccatttccttggggtaatgtctgatgtttttgtccctgtcataaaaagatggagagactgtgtccagcctttgattcctacttcctacaatcccaggttctaatgaagtttgtggggcctgatgccctgagttgtatgtgatttaataataaaaaagcaagataca

SEQ ID NO: 7 - DNA, 5164 bp, Artificial sequence
  Synthetic sequence
tttcagttggaaggaggtagggaaaataagtgctttaattcctaggattttggaagtaaaaatggaacaccagacaaaaatggaatttttaggcaaatgtaaagctttgtacttgggtatctcaaagtattatacagtgtaaactatcatgattattaaccaactagaagtagttcttttttttaaattttatttttaattttagacatgagggtcttgctatgttgcccaggctgaagtggctactgacaggcacgatgtggcactgcagcctggaactcttgggcttaagtgatccttcctgcttcttctatcttaaaaaaaaaaagttacgcttgcttgttaaaatatttttaaaatgctgtgtttaaactaagaagtaaatatccaccccacctctgacttctaaaaattatctaaagtatgactggtaagatttttacctttaatcccacataagtctaaaatttgtgttcatttccaacaaccaaagtgtgtcacttttataccagaattttgtcctgcttatacgtttagtacagaaatctcatgggagagagcatccatgcatttacaaattgttattgaattattttattgaatgatgacacccaaactgagctagaacataattctggctctgctagtacatcttctgtgtgatcttggacaagtcactctactttcctttcaattttcttttctcacagggagataatcataaaaacgactgtaaagtacagcacttcatagagtgctttttgtttaaagagctgacaataaatacgagtctcaaggtctaggaaagcctccctcacaacctgagctgcttgaggacaagggattttcttttgaatcagcagtaccttatttgtgtatctgtgatagagttcctggtacataagaaggtctcaataaatatgtgaatttatgaatattaggcagattgcaaccttgacaggccactgcctcttaaatctcctttctgtgatcttttaatatttaacatctaaaaggccgccgctacttgctttgggataagtatccccggtatgtactttaaaatgcccaagcctagagaaatgattcttgtcttaagggcaccatttcgctctcccaccgtaaagcgccccaggcttgggatctgggtcccaaggctacagggaagagtttggaacgggaagctcatcttccggccctctgattggccggctcgcactccactcacgcggcgcgcagctctgattggcctcggcggcacccctcgtcccgcgactactttgtgtgctggggcggcgcgctccggtcctcccgctcagctggcggtctgggctgctctggggcagcccttcggtccactgctctgcatcgcgggcgccgggaattttccgagtccgagcgggttgctgcttttgctcagaggacatccatgaccctaatggtctttttgttcaagataaagtgattttttgcctttgttgattaactggacaaattcagcatgtagagcgcatgaagtacaggacaataaagcttcctacacatatcaccaggaggatctctttgaaagattcactgcaggactaccagagagaataatttgtctgaagcatcatgtgttgaaacaacagaagtctattcacctgtgcactaactagaaacagagttacaatgttttcaattctttgagctccaggactccagggaagtgagttgaaaatctgaaaatgcggccatggactggttcctggcgttggattatgctcattctttttgcctgggggaccttgctgttttatataggtggtcacttggtacgagataatgaccatcctgatcactctagccgagaactgtccaagattctggcaaagcttgaacgcttaaaacaacagaatgaagacttgaggcgaatggccgaatctctccggataccagaaggccctattgatcaggggccagctataggaagagtacgcgttttagaagagcagcttgttaaggccaaagaacagattgaaaattacaagaaacagaccagaaatggtctggggaaggatcatgaaatcctgaggaggaggattgaaaatggagctaaagagctctggtttttcctacagagtgaattgaagaaattaaagaacttagaaggaaatgaactccaaagacatgcagatgaatttcttttggatttaggacatcatgaaaggtctataatgacggatctatactacctcagtcagacagatggagcaggtgattggcgggaaaaagaggccaaagatctgacagaactggttcagcggagaataacatatcttcagaatcccaaggactgcagcaaagccaaaaagctggtgtgtaatatcaacaaaggctgtggctatggctgtcagctccatcatgtggtctactgcttcatgattgcatatggcacccagcgaacactcatcttggaatctcagaattggcgctatgctactggtggatgggagactgtatttaggcctgtaagtgagacatgcacagacagatctggcatctccactggacactggtcaggtgaagtgaaggacaaaaatgttcaagtggtcgagcttcccattgtagacagtcttcatccccgtcctccatatttacccttggctgtaccagaagacctcgcagatcgacttgtacgagtgcatggtgaccctgcagtgtggtgggtgtctcagtttgtcaaatacttgatccgcccacagccttggctagaaaaagaaatagaagaagccaccaagaagcttggcttcaaacatccagttattggagtccatgtcagacgcacagacaaagtgggaacagaagctgccttccatcccattgaagagtacatggtgcatgttgaagaacattttcagcttcttgcacgcagaatgcaagtggacaaaaaaagagtgtatttggccacagatgacccttctttattaaaggaggcaaaaacaaagtaccccaattatgaatttattagtgataactctatttcctggtcagctggactgcacaatcgatacacagaaaattcacttcgtggagtgatcctggatatacattttctctctcaggcagacttcctagtgtgtactttttcatcccaggtctgtcgagttgcttatgaaattatgcaaacactacatcctgatgcctctgcaaacttccattctttagatgacatctactattttgggggccagaatgcccacaatcaaattgccatttatgctcaccaaccccgaactgcagatgaaattcccatggaacctggagatatcattggtgtggctggaaatcattgggatggctattctaaaggtgtcaacaggaaattgggaaggacgggcctatatccctcctacaaagttcgagagaagatagaaacggtcaagtaccccacatatcctgaggctgagaaataaagctcagatggaagagataaacgaccaaactcagttcgaccaaactcagttcaaaccatttcagccaaactgtagatgaagagggctctgatctaacaaaataaggttatatgagtagatactctcagcaccaagagcagctgggaactgacataggcttcaattggtggaattcctctttaacaagggctgcaatgccctcatacccatgcacagtacaataatgtactcacatataacatgcaaacaggttgttttctactttgcccctttcagtatgtccccataagacaaacactgccatattgtgtaatttaagtgacacagacattttgtgtgagacttaaaacatggtgcctatatctgagagacctgtgtgaactattgagaagatcggaacagctccttactctgaggaagttgattcttatttgatggtggtattgtgaccactgaattcactccagtcaacagattcagaatgagaatggacgtttggtttttttttgtttttgtttttgttttttcctttataaggttgtctgtttttttttttttaaataattgcatcagttcattgacctcatcattaataagtgaagaatacatcagaaaataaaatattcactctccattagaaaattttgtaaaacaatgccatgaacaaattctttagtactcaatgtttctggacattctctttgataacaaaaaataaattttaaaaaggaattttgtaaagtttctagaattttatatcattggatgatatgttgatcagccttatgtggaagaactgtgataaaaagaggagctttttagtttttcagcttatttactttgttttttttcctgtttctgatatagtaactaattcttaactcagagacattggtccattttaatactgaaaaccaattttcattggtacacattacaaaattgctaagaacactgtttgggagctttcattctcatattttggacattgttttaattgagtgaaataatcataactccttgctcccagagaagctatcacctccatttctaaaaccatttcaggtttgtttggtagtctttcttaatgtatttattatcgctttttgtgagtagggtcctgttttatccaggaaccaatttctgccctagcctatcatgccctgcttttgagagtaccaggtatctttgggattgggaagctggctgtttcagaagtatatgtctcatagtgtgcagaacttggtgaccaagtgagaagcgggaccaatgggagactcacaatggactgagtcttgggattatcttttccaaattcttccatgttagaatcacttcagaaaataagactttgatgctttgtctctgagcatcatttttctcctcataaaaacacttccttattgtatgtagcctgcctcctacagaggcctggtaggtgttactgcattctaaaagaaaaatgtcatctctgtaggagcgactatcaggcctagtgtgaaatattagggatcctaggcagaagagctattagtcctggccttcatatcttcaccaaatgaaaatactgtatataaaatttcaccaccaaacttaactaaattctttttctcaagtcaagcctcccaaagaaaaaagaaattaacttcctacagtgtcagcaagcaattttccatttagttttggtacaaataaaagtcatttgaaac

SEQ ID NO: 8 - DNA, 1665 bp, Artificial sequence
  Synthetic sequence
ctccctgcacggcctcccgtgcgcccctgtcagactgtggcggccggtcgcgcggtgcgctctccctccctgcccgcagcctggagaggcgcttcgtgctgcacacccccgcgttcctgccggcaccgcgcctgccctctgccgcgctccgccctgccgccgaccgcacgcccgccgcgggacatggcacacgcaccggcacgctgccccagcgcccggggctccggggacggcgagatgggcaagcccaggaacgtggcgctcatcaccggtatcacaggccaggatggttcctacctggctgagttcctgctggagaaaggctatgaggtccatggaattgtacggcggtccagttcatttaatacgggtcgaattgagcatctgtataagaatccccaggctcacattgaaggaaacatgaagttgcactatggcgatctcactgacagtacctgccttgtgaagatcattaatgaagtaaagcccacagagatctacaaccttggagcccagagccacgtcaaaatttcctttgacctcgctgagtacactgcggacgttgacggagttggcactctacgacttctagatgcagttaagacttgtggccttatcaactctgtgaagttctaccaagcctcaacaagtgaactttatgggaaagtgcaggaaataccccagaaggagaccacccctttctatccccggtcaccctatggggcagcaaaactctatgcctattggattgtggtgaacttccgtgaggcgtataatctctttgcagtgaacggcattctcttcaatcatgagagtcccagaagaggagctaatttcgttactcgaaaaattagccggtcagtagctaagatttaccttggacaactggaatgtttcagtttgggaaatctggatgccaaacgagattggggccatgccaaggactatgtggaggctatgtggttgatgttgcagaatgatgagccggaggacttcgttatagctactggggaggtccatagtgtccgggaatttgtcgagaaatcattcttgcacattggaaaaaccattgtgtgggaaggaaagaatgaaaatgaagtgggcagatgtaaagagaccggcaaagttcacgtgactgtggatctcaagtactaccggccaactgaagtggactttctgcagggcgactgcaccaaagcgaaacagaagctgaactggaagccccgggtcgctttcgatgagctggtgagggagatggtgcacgccgacgtggagctcatgaggacaaaccccaatgcctgagcagcgcctcggagcccggcccgccctccggctacaatccccgcagagtctccggtgcagacgcgctgcggggatggggagcggcgtgccaatctgcgggtcccctgcggcccctgctgccgctgcgctgtcccggccgcaagagcggggccgccccgccgaggtttgtagcagccgggatgtgaccctccagggtttgggtcgctttgcgtttgtcgaagcctcctctgaatggctttgtgaaatcaagatgttttaatcacattcactttacttgaaattatgttgttacacaacaaattgtggggccttcaaattgtttttctcttttcatattaaaaatggtctttctgtgaactagca

SEQ ID NO: 9 - DNA, 3487 bp, Artificial sequence
  Synthetic sequence
aaggccacgtgggggcgtgtcaggaagtgagtccagggcccgcctcccggggagtcggcctcggatgtccggaggctcctgggctgagccggcgacagagcccgggaaggcagcgagacgtgggcgccggcccagccccctcccgcgtccttcagccccaagccccgagcccctctgacccttccgcagccctccctccagccgcgcccggcctccggcagctccctgtacgcctccctccccctgcccgcccctccctcccacagccgcccatgacgccctctcggcacctcttcccactctgccacgcgtccttttcctgcaccttcgccccgcgtacctactcctgccccgccctgccattcctctcccctcccttctctctgcgacccctccctgttaggccccagcctcttctcccctcacaggtcttctctgtcctggcctcaccgccttatcctattcctctcccttgccctgtgtcttgtctcagagccccctcggggtgggagtaggttgtggagcagcacaactgggctcaccccaaagcagaacttctcaatccatgaggacaatggggaggcctttaggccagcccacatgtgacaatggagggctgcggcttccttgcggagagcacaagtgagctcactgccctggactccagggaatcagagttctggccgcggggtgacccagctcctctgctaccatgaatagggcccctctgaagcggtccaggatcctgcacatggcgctgaccggggcctcagacccctctgcagaggcagaggccaacggggagaagccctttctgctgcgggcattgcagatcgcgctggtggtctccctctactgggtcacctccatctccatggtgttccttaataagtacctgctggacagcccctccctgcggctggacacccccatcttcgtcaccttctaccagtgcctggtgaccacgctgctgtgcaaaggcctcagcgctctggccgcctgctgccctggtgccgtggacttccccagcttgcgcctggacctcagggtggcccgcagcgtcctgcccctgtcggtggtcttcatcggcatgatcaccttcaataacctctgcctcaagtacgtcggtgtggccttctacaatgtgggccgctcactcaccaccgtcttcaacgtgctgctctcctacctgctgctcaagcagaccacctccttctatgccctgctcacctgcggtatcatcatcgggggcttctggcttggtgtggaccaggagggggcagaaggcaccctgtcgtggctgggcaccgtcttcggcgtgctggctagcctctgtgtctcgctcaacgccatctacaccacgaaggtgctcccggcggtggacggcagcatctggcgcctgactttctacaacaacgtcaacgcctgcatcctcttcctgcccctgctcctgctgctcggggagcttcaggccctgcgtgactttgcccagctgggcagtgcccacttctgggggatgatgacgctgggcggcctgtttggctttgccatcggctacgtgacaggactgcagatcaagttcaccagtccgctgacccacaatgtgtcgggcacggccaaggcctgtgcccagacagtgctggccgtgctctactacgaggagaccaagagcttcctctggtggacgagcaacatgatggtgctgggcggctcctccgcctacacctgggtcaggggctgggagatgaagaagactccggaggagcccagccccaaagacagcgagaagagcgccatgggggtgtgagcaccacaggcaccctggatggcccggccccggggcccgtacacaggcggggccagcacagtagtgaaggcggtctcctggaccccagaagcgtgctgtggtgtggactgggtgctacttatagacccaatcagaatacggtggttgagaaggaaccagtgtttacaagtaatatcagaaagttgaaggaaccagtgtttacaagtaataccagaaagttgccaaacccttctctatcctctcgtatttctgagtttttgtccttcccgagggagcaccctagtgagagttgaaccccttccttctgcctccagggcctgtctgcctccacatcactctgaggacagggacaggcaacaaccttgaagggacagcaatggcaaagccacaaaggcttcactgtactcaggggagatggccctaccacagccacctggagagggttgggaagccttccgtctgcggtgggcaggcagcctcaccctgggcccacagaccggccttcctttggaggaaagtgtggcctggactgagggaggaaatgagcgagttccctctgacaccagcagatccccaggggctgctgggcagtggcctgggaatggggtggattgtgagaaagtgctcaccatctatacaccctgtatgtccagcttttgaacacaagggaaccatgcttctcttagaggttaagcagggtcattaacatcctcccccagtccctaacatcacattgtcctgcgtggctcctctggccctgagtggcacctgtccctctggtctcccagcacctggcccaggtaacagccttctgaaagcagagccaaggagctgcttctctcttctcccagttctacctccccagaagccttcctccccaggtggggctgatggagcaagggtccagactaggagccttccaccccagctgtgtctggcgcccctagatctctgcaagggaggtgttacagctggttctgagccgcttgccttgtgatggtaagacaccaacctttacattcttccctgaggttgtggctgacagagcctgcttggccccactgttagtccagcgagctcctatatcaaaatgccgtaggccgggtggcttacaaacaacagaaacgtattgctcacagtcctggggggctgggacgcccaagatcaagaggccagcagattcggactccgctgagggctgtttcccgatccatagatggtgccttctcgctgtatcctcaatggtagaagcacaaacaagcaagctccttcctgcctcttttataaggactccaaccctgttcatgagggttccgcccccatgacccaatcagctccaaaggccccacctcctaatactgtcaccttgggggtgagaattccaatgtgaatttgcagggggagtgggggacacacacaaatttcggggccataccacccttcaccacaccctcctgcgctcagggtggcttgcagtccctggcccttctggtgggcatttggtatgtcctttctcttggggtgatttctgatgtttttactctatatagtgaaaagctagggagagcgggtcttctcccccctccctctccagtcccctcacaatcccagatgggttctaatgcagctgctggggcctgatgccctgagttgtttgtgattcaataaagaatccataag

SEQ ID NO: 10 - DNA, 2917 bp, Artificial sequence
  Synthetic sequence
tcccaaagaaaccctcgatagacgaagatgatggaggttctcggacctcagagtcccctgccagttgcttcggcttcgttgcttactctgtgaaccctggagacaaatcacgggttaaggttaaatcctaccagcccactcactgcagtacctccccctccgaactctctgggtcccccacaccatcgccattgccctcgcccagaaagctccgttgcttggaccagcgagataccgagtcggaggagaggcaagatcaagagagacaagatcaagagaggcacgaatacaaaaagaagcttagagagggcaaccaacactgtacatttaattctctgtggctaggagcaccttccaccatggccacctcagcaagttcccacttgaacaaaaacatcaagcaaatgtacttgtgcctgccccagggtgagaaagtccaagccatgtatatctgggttgatggtactggagaaggactgcgctgcaaaacccgcaccctggactgtgagcccaagtgtgtagaagagttacctgagtggaattttgatggctctagtacctttcagtctgagggctccaacagtgacatgtatctcagccctgttgccatgtttcgggaccccttccgcagagatcccaacaagctggtgttctgtgaagttttcaagtacaaccggaagcctgcagagaccaatttaaggcactcgtgtaaacggataatggacatggtgagcaaccagcacccctggtttggaatggaacaggagtatactctgatgggaacagatgggcacccttttggttggccttccaatggctttcctgggccccaaggtccgtattactgtggtgtgggcgcagacaaagcctatggcagggatatcgtggaggctcactaccgcgcctgcttgtatgctggggtcaagattacaggaacaaatgctgaggtcatgcctgcccagtgggaattccaaataggaccctgtgaaggaatccgcatgggagatcatctctgggtggcccgtttcatcttgcatcgagtatgtgaagactttggggtaatagcaacctttgaccccaagcccattcctgggaactggaatggtgcaggctgccataccaactttagcaccaaggccatgcgggaggagaatggtctgaagcacatcgaggaggccatcgagaaactaagcaagcggcaccggtaccacattcgagcctacgatcccaaggggggcctggacaatgcccgtcgtctgactgggttccacgaaacgtccaacatcaacgacttttctgctggtgtcgccaatcgcagtgccagcatccgcattccccggactgtcggccaggagaagaaaggttactttgaagaccgccgcccctctgccaattgtgacccctttgcagtgacagaagccatcgtccgcacatgccttctcaatgagactggcgacgagcccttccaatacaaaaactaattagactttgagtgatcttgagcctttcctagttcatcccaccccgccccagctgtctcattgtaactcaaaggatggaatatcaaggtctttttattcctcgtgcccagttaatcttgcttttattggtcagaatagaggagtcaagttcttaatccctatacacccaaccctcatttcttttctatttagctttctagtgggggtgggaggggtaggggaagggaacgtaaccactgcttcatctcatcaggaatgcatgtccagtaggcagagctgccacagagcgggtgtatttgtggaggaggactttttcttcaggacagttaaaagagcaggtccactgcttggattgacaattcccctataggtagagagctgctagttcttcaggtaaaaccaactttctattccaaatggaagttaggtgaggagtagtgggaggagttcatgccctccatgaagacagctcagtgtatcacctgacagatgggtagccctactgtaaaagaaggaaaagttatttctgggtcctccatttataacacaaagcagagtagtatttttatatttaaatgtaaaaacaaaagttatatatatggatatgtggatatatgtgtatttctaattgaggaaaccatcctagtcactgggtttgccaagtttgaagagcttggttaacaagaaaggatctcttgagtagaggtgggggtgcagtaccaggaaaggtggttatctggggctcagcgctttattactatgtggggtttccctgcccactctgcaggagcagatgctggacaggtagtagggtgggacaccagtgcttgccaccacctgtccctgtgcttaggctaagatgcatatgtatccacatagagttagcaggatggagttggctggtcaacttgaacattgttactgataggggtgggtggggtttattttttggtgggactagcatgtcactaaagcaggccttttgatatattaaattttttaaagcaaaacaagttcagcttttaatcaactttgtagggtttctaactttacagaattgcctgtttgtttcagtgtctccttccactttgctcttggaggaacggaggacaggcagacctggagttaaaacatttgtcattttgtgtcatagtgtctactttctcccagcagaatattcctttccttcttaggagtcctatggagttttgtttttgttttttttctattacgataaacataccccacctccattctggcttgccctgctgttctctggttgtttgtgtgctgtccgcagcaggctgcctgtggttttctcttgccatgacgacttctaattgccatgtacagtatgttcagttagataactcctcattgtaaacagactgtaactgccagagcagcgcttataaatcaacctaacatttataaga

SEQ ID NO: 11 - DNA, 1327 bp, Artificial sequence
  Synthetic sequence
tgtcatggttcgaccgctgaactgcatcgtggccgtgtcccagaatatgggcatcggcaagaacggagattttccctggccaatgctcaggaacgaattcaagtacttccaaagaatgaccaccacctcctcagtggaaggtaaacagaacttggtgattatgggccggaaaacttggttctccattcctgagaagaatcgacctttaaaggacagaattaatatagttctcagtagagagctcaaggaaccaccacaaggagctcattttcttgccaaaagtctggacgatgccttaaaacttattgaacaaccagagttagcagataaagtggacatggtttggatagttggaggcagttccgtttacaaggaagccatgaatcagccaggccatctcagactctttgtgacaaggatcatgcaggaatttgaaactgacacgttcttcccagaaattgatttggagaaatataaacttctcccagagtacccaagggtccttcctgaagtccaagaggaaaaaggcatcaagtataaatttgaagtctatgagaagaaaggctaacagaaagatacttgctgattgacttcaacttctactgctttcctcctaaaattatgcatttttacaagaccatgggacttgtgttggctttagatctatgagttattctttctttagagagggatagttaggaagatgtatttgttttgtggtaccagagatggaacctgggatcctgtgcatcctgggcaactgttgtactctaagccactccccaaagtcatgccccagcccctgtataattctaaacaattagaattattttcattttcattagtctaaccaggttatattaaatatactttaagaaacaccatttgccataaagttctcaatgcccctcccatgcagcctcaagtggctccccagcagatgcatagggtagtgtgtgtacaagagaccccaaagacatagagcccctgagagcatgagctgatatgggggctcatagagataggagctagatgaataagtacaaagggcagaaatgggttttaaacagcagagctagaactcagactttaaagaaaattagatcaaagtagagactgaattattctgcacatcagactctgagcagagttctgttcactcagacagaaaatgggtaaattgagagctggctccattgtgctccttagagatgggagcaggtggaggattatataaggtctggaacatttaacttctccgtttctcatcttcagtgagattccaagggatactgcagagacagaacaagaataggctgcttctacc

SEQ ID NO: 12 - DNA, 7981 bp, Artificial sequence
  Synthetic sequence
gtaaaactattccccgtgaaggcggcagggcagaggtccagggcgggctttgctgggagcctcgggaccccgggttgggggccgtggggcggcacctggcgagctggcgggtgggcggcgagccgaggcttcccggcctggcggcaactcgcccctctgccctcagccctcccggctccgctcccttcccccacgccgccctgcccctcccccacgcccctttctctttctttctttctttcccagttcgcttgcccccaccccagcggcgcccgccgggctcctcgcccaatggccgcggggcccgggaccgcatcagctgatcggcccgggctcctggccgctgggagccaatcagggcaccgggggcggccccgggccgcggataaagggtgcggggctgctggcggctctgcagagtcgagagtgggagaagagcggagcgtgtgagcagtactgcggcctcctctcctctcctaacctcgctctcgcggcctagctttacccgcccgcctgctcggcgaccagaacaccttccaccatgaccacctcagcaagttcccacttaaataaaggcatcaagcaggtgtacatgtccctgcctcagggtgagaaagtccaggccatgtatatctggatcgatggtactggagaaggactgcgctgcaagacccggaccctggacagtgagcccaagtgtgtggaagagttgcctgagtggaatttcgatggctctagtactttacagtctgagggttccaacagtgacatgtatctcgtgcctgctgccatgtttcgggaccccttccgtaaggaccctaacaagctggtgttatgtgaagttttcaagtacaatcgaaggcctgcagagaccaatttgaggcacacctgtaaacggataatggacatggtgagcaaccagcacccctggtttggcatggagcaggagtataccctcatggggacagatgggcacccctttggttggccttccaacggcttcccagggccccagggtccatattactgtggtgtgggagcagacagagcctatggcagggacatcgtggaggcccattaccgggcctgcttgtatgctggagtcaagattgcggggactaatgccgaggtcatgcctgcccagtgggaatttcagattggaccttgtgaaggaatcagcatgggagatcatctctgggtggcccgtttcatcttgcatcgtgtgtgtgaagactttggagtgatagcaacctttgatcctaagcccattcctgggaactggaatggtgcaggctgccataccaacttcagcaccaaggccatgcgggaggagaatggtctgaagtacatcgaggaggccattgagaaactaagcaagcggcaccagtaccacatccgtgcctatgatcccaagggaggcctggacaatgcccgacgtctaactggattccatgaaacctccaacatcaacgacttttctgctggtgtagccaatcgtagcgccagcatacgcattccccggactgttggccaggagaagaagggttactttgaagatcgtcgcccctctgccaactgcgaccccttttcggtgacagaagccctcatccgcacgtgtcttctcaatgaaaccggcgatgagcccttccagtacaaaaattaagtggactagacctccagctgttgagcccctcctagttcttcatcccactccaactcttccccctctcccagttgtcccgattgtaactcaaagggtggaatatcaaggtcgtttttttcattccatgtgcccagttaatcttgctttctttgtttggctgggatagaggggtcaagttattaatttcttcacacctaccctcctttttttccctatcactgaagctttttagtgcattagtggggaggagggtggggagacataaccactgcttccatttaatggggtgcacctgtccaataggcgtagctatccggacagagcacgtttgcagaagggggtctcttcttccaggtagctgaaaggggaagacctgacgtactctggttaggttaggacttgccctcgtggtggaaacttttcttaaaaagttataaccaacttttctattaaaagtgggaattaggagagaaggtaggggttgggaatcagagagaatggctttggtctcttgcttgtgggactagcctggcttgggactaaatgccctgctctgaacacgaagcttagtataaactgatggatatccctaccttgaaagaagaaaaggttcttactgcttggtccttgatttatcacacaaagcagaatagtatttttatatttaaatgtaaagacaaaaaactatatgtatggttttgtggattatgtgtgttttgctaaaggaaaaaaccatccaggtcacggggcaccaaatttgagacaaatagtcggattagaaataaagcatctcattttgagtagagagcaagggaagtggttcttagatggtgatctgggattaggccctcaagacccttttgggtttctgccctgcccaccctctggagaaggtgggcactggattagttaacagacaacacgttactagcagtcacttgatctccgtggctttggtttaaaagacacacttgtccacataggtttagagataagagttggctggtcaacttgagcatgttactgacagagggggtattggggttattttctggtaggaatagcatgtcactaaagcaggccttttgatattaaattttttaaaaagcaaaattatagaagtttagattttaatcaaatttgtagggtttctaggtaatttttacagaattgcttgtttgcttcaactgtctcctacctctgctcttggaggagatggggacagggctggagtcaaaacacttgtaattttgtatcttgatgtctttgttaagactgctgaagaattattttttttcttttataataaggaataaaccccacctttattccttcatttcatctaccattttctggttcttgtgttggctgtggcaggccagctgtggttttcttttgccatgacaacttctaattgccatgtacagtatgttcaaagtcaaataactcctcattgtaaacaaactgtgtaactgcccaaagcagcacttataaatcagcctaacataagatctctctgatgtgtttgtgattctttcaaatccctatgtgccattatatttctttatttcctaaaacaggcaaaataagctcaagtttatgtactctgagtttttaaaacactggagtgatgttgctgaccagccgtttcctgtacctctctaagttgggtatttgggacttaagggattaagtttttcacctagacttagttacacacaatcttggcatttcctagcctagaggtttgtagcagggtacaagccccactcctcccccttcctttgctcccctgagtttggttttggcttaccataacattgttttgaccattcctagcctaatacaatagcctaacataatgtaagattaactggctttacgatttctattctctgctctcagtgataagaaacaaatattagctaccctgctaccctggttgaagccttccaaggctggctatgccctaggcatgggctcatccttgggtgtatcttgccttgcaggaagaccagtggaccgattgtgattctcaaaagctctgtgttgtcacctgtgcccttgccccttgctcttatcttggtccgtgtatctgggagttcttccaccttatcttggccaattcctaccttcgttcattcctcatgaggttgggtaaaagctccctccggctcccatgatgctgtgcatatacctagcaaaaagcaattattggacacattggagtgcaatattattaatagcattaatactactaataatgtgggcaatagtgattgtttttaaaaggcagtatactcttaccagtgcgaggtagctggggcctgtgatagtttttagagataagttcttcaggcaactgtgtattttacactagtcaagtaatcctagatatccgtggtttttcttaagaaagttggctcgtaatatgatttaatattcaaagtagagtcatctacctattagcttgctggcgtggtcctagtttatgcctgtttcagcatgattgttgagtaccctgtttcatccttagcattttcttgattttgttgttaaatgatgtatacccttatttccattgaatctgtgcttccacccccccaactgaagttgtcttccctttgcttggccacccttacagcctcttggatggtgtatcctacagtgtaagcactaaactgaagaggcagtgacctgagcactttggattttgttcattgtaatcaattccatgacaaaatgattgcatgagaaggaattttaaattcataggatcagaatttaggtgaaaacaaccagcatatttgtttcttcaccctctcacctagaattagctttgacctacaggtcacagtgcaatccccttgtatttctaaggtgttttttatagttcatttgcagacaatgggttatgtgataacttttatcagtgatagattaaacagaataatgaccaagctttcaaccttaaggagtcaggccagtatttacaaaaggaggtctccatgaactccttaaatatgagttcccctaatatcatcttgccaggtactaaataacaactgatagcacaagctatagggaatttgaaagaattccatggatgggtgttgtctagggccttttgttgtttttgagacggggtctgactctcacccaggctggagtatagtgtggcgcaatcttggctcactgcaacttctgcctcccagattcaagcgattctcctgcctcagcctcccaagtagctgagactacaggtgtgcaccaccatgctcagctaatttttgtatttttagtacagatggggtttcaccatgttggccaggctggtcttgaactcctgatctcccaaagtgaggtcttgaactggtcttgaactcctccacctcccaaagtgctgggattacaggcgtgagccactgcacccggcctagggccatgtaaaaagccagatctgtgctgctgtctgtgtagaagggtagacaagtggatgagaagttcctgaactattcttggcccttttaccactaagtgaaagtaacttgctgccccaaagaaagatgtctcatcattcgacaggactttctagttgaacttcatgaaagcaagagatcctgtttttcttgctcaccactgtatcttgagacctgttgtagtgcctgcaatacttatttaataagttatttttaagtatcagttttgtgagctttaactctatgaggtctttgttgtttgactgtattttaactctggccatgacagcaagacaaagttccatttttattgagcttaaaaagaatcaaggccaggtgaagtggcttacgcctgtgatcccaacactttgtgaggctgcagcaggaggatctcttgagcccaggagtttgagaccgttctaggcaatgtagtgaggtccagactccacaaaataatttttttttaaattgcacgcctgtagtctcagctatcaggaggctgagatgggaggatgacttgagcccaggaaattgaagctgcagtgaattgtgattgcaccactgcactccagcctgggtgacagatcaagaccttgcctaaacaaaacaaaacaaacaaaaccccaaaaaacaaattgaaaatgttgattctttttactacaaacattatggcagcactaaaaacttcgtgggagtgtactgtggaaaatagtgtacttaattaattctcattgtaatcaggctaccaagagccttgtgttgctttaagagttataactgccaggcacagtggctcatgcctataatcccagcaccttgagaggccgaggcaggtggatcacctgagatcgggagtttgagaccagccgggccaatatggtgaaacaagctgtgtctctactaaatacaaaaaattagccgggcgtggtggcacatgcctgtaatcccagctgcttgggagactgagacaggagaattgcttgaacctggaaggcggaggttgcagtgagctgagattgcaacattgtactccagcctgggcaacaagagggaaactccatctcaaaaaaaaaaaaaaagttgtaactgaggctgggcatggtggctcatacctgtaatcccagcactttgaaaagccgaggcaggtagatcacttgagctcagaagttcgagactagcctgggcaacatgacaaaaccccatctctacaaaaaatacgaaaaattagctgggcgtggtggcatgcacctgtagtcctagctacctgggaggctgaggtgggaagattacttgaagctgcagtgagccatggttgtgccactgccctccagtctgggcaacaaagtgagaccctgtctcaaaaaaacaaaaaaaaattataactgatgtaaactggcagtttaggctgggtgtggtggctcaagcctgtaatcctagcactttgggaggccaaggcaggtggatcacctgagttcaggagttcgagaccagcgtggccaacatggtgaaaccttgtctctattaaaaataccaaaattagcaagatgtggtggtgggtgcctataattccagctactcaggaggctgaggcaggaggatcgctggagccagggaggcagaggttacagtaagcaaagatcactccacttcactccagcctgggcaaaagagtgagacatatcaaaaaataaacaaataaataaataaataagtggcagttcatcatttaactccaaagactttgcgtacatttctactgaaaacaatctgagctgattagaaccctgccattttatagcctttagctcgatctccgaccgttcatttaaaaaaattctacttcaggccgggcatggtggctcaagcctgtaatcccatcactgtaggaggccaaagtgggcagatcacttaaggtcaggagtttgagaccagcctggccaccatggtgaaaccccatctctactaaaaatacaaaaattagccgggcttggtggtgagcacctgtaatcccaccctgccgagtggcaggctgaggcaggagaatcgcttgagcccaagagccggaggttgcagtgagccaagcttgcaccattgcactccagcctaggcaacagagtgtgactccatctcaagaaaaaaaaaattctatttcattttacaatatgcagatatatgtccatacacatgcataatataaatgtataccatatttgtgagaatatgcatatatgtacacattagatacacaatacaagcacaatacatatgtcttttgcccaagatacagcattttgtaaaggagacaggaatttagtaatatatgttccagaaacagtacacaagagaattcgccgagatgagaaagttgtcactaggaatggggagtggtaagatgtagaaggtataattgttcttaaagttctactgccaactctttccaattaattacccactctgccatgctttatggacaggaggttgtcggacactgtcaattaataaatatttgagcatgatacactgcttggagctcctctaatataggagagtgatatcctagtgcatgttacagagggagtgtccacacagttcctattgtcatttgatgagttacttttcaggggccttgtacctgagcaagttgtcctctttttgatggatttcagattgagttacctgcattgtcttgagattgcagcgtgtttcctccactgtacggcgtagtcagcagatctattagttaaactccagtgggccctcagtcactaaatctatcctctgtgttgaaggctttctgcatttgcctttcaataaaggtttagaataactccttaaaaaa

SEQ ID NO: 13 - DNA, 5394 bp, Artificial sequence
  Synthetic sequence
cgcggtctctctttcctgccagctcctgctcagagttgtcagggtctgtctccgcgtcagtggtttccgtctccgcttccctgcctccatcgccccagcccttctgcaggtcctcctccgagacctcaaggagagctcagaagccagagacactagagccgaagtcatggaagaagtatcagcctgctccctcaacagcactctgttccagcaggaacaccagaaagggaccacctaccggattccagcgctgctctacatccctcccagccacaccttcctggcctttgcagagaagcgttcctcaagcaaagacgtagatgctctccacctggtgctcaggcgaggggtgatgaagggccactctgtagagtggggacccctgcagccactgatggaagccacattgcctgggcatcggaccatgaacccctgccctgtatgggagcagagtaccagccgtgtgttcctgtttttcatctgtgtgccagaccgtgttactgaacattggcagattaggtcaggcaagaatgccgcccgtctctgcttcctgtgcagtcaggatgctgggtgctcatggggtgaagtgaaggacttgactgaggaggtcattggctcagaggtgaagcactgggccacatttgctgtgggcccaggccatggcatccagctgcagtcaggaaggctgatcattcccacctacgcctactatttctcacacaggttcctctgcttcccgtgttcagtcaagccccattccctgatgatctacagtgatgacttaggagtcacatggcaccatggcaagctcattgggccccaggtgacaggggagtgccaagtggcagaagtgactgggacgtctggtaaccttgtgctctactgcaatgcccggacaccaaacagattccgagcagaatcttttagtactgattacggtgactgttttcagaaaccaaccctgaacacacaactctgtgagccccgctatggctgccaaggcagtatagtgagcttccagcccttgaagatgccattctcacaagacccaattggtaaagctgctcccactactcagaagagccctctgctggacagttttctggagcgggaggaaggagttggaagaccatcaggaacatggctcttgtactcacatccaactagcaagaagcggagaattaacctgggcatctactacaaccggaaccccttggaggtgacctgctggtcccgcccttggatcttgcactgtgggccctgtggctactctgatctggctgttgtggaagagcagggcttatttgcatgtttgtttgaatgtgggcaggagcatgagtgtgagcagattgccttccgtctattttcagtccaagaggttttgagctgtgaagactgcactggccctagtagggactaaagccaaatcaagcctgatgggtgaggacccaactttcctcagaagtgaatggcaactgcagctgggataacatgggtcactgatgtctacagaaaatccaaaaactaatacttcgctccttgtacttttcacttttccctttccaatgagccaagagaaatgtgtgccttatcttacacagcaataagggtgttgaactgggagtttggagacaatggtgtggttttggcttgctttaggactgtggatatatcccctgaactctgggcatcaggtctccatttgtaaaatgacaagggtggtttgtgatttcttgtcttcccattaaaaggagtgttcacttcttgtcccacaaaccctggattctgctcttgagtaaaagccatagacttatcttttcaaatgactcactactcacctgagtatgaggtgacatatagatgctttggccagaagaaagatcttcattgttgtttttaatcaggaaaatgcccttatccctctaatcatgcctggagctctgcatgttctctatcctgaaggactgagagcagaactgtgaagtcgctgctttccctagcattgctgctgggttcaacctccccttcctcctccagacatttcccagggcagaaaatgagaaacccaggccagctgcccttgatagcggtgcttattgcttttgataccattacctccattaaaggtgaatctgaggggactgaaagatggctcagtggttaagagcaccagctgctcttctaggggacctgggttctgttcccagcgctcccacttggcaactcctaactgtctaactccagttccagaggatccaatcccctccactggcctctgcacacacacacacacacacacacacacacacacacacacacacacacacacacacacggaggcaaaacagccatacacagttctcttgtcccttggctcaagtccctttgtggctctccattgtttactaaaggatggttacaaggcagcctggtgtgcagaccttccttccaggttgaggggaaaggaatgaatgcacacatactttccttcactcttatgtgaagcccactcactgtcagtcaggggagacctctctccaggtgggaagtaaagagcagccatggcctaacagcgggaaagataggctgaatgaatgaatgaatgaatgaatgaatgaatgaatgaattaatgaagagtgagtcagagattcttggcttactttagctgcatcctcccctctcctcctacattcagaccctgctgatcagtcactgaaagctgtgtgtgctagcctggttctgggttcggtacgatgctccttggagctggactttgatctaggttgagcctggtcttgccttgtgagatgtcccaagcctaaagccaagctatgatgtgtggggttctcatttcaatagtattttccttttgtccctgattggatttcccatgactgtctctcctccaggattccaagggagatgctgaactcatcatgttctgagtgtgtcttgcttgactctgtgatgccagcatcagacacatcactgtaccacaatcattaccatcacttagaacagtgtttctcaaactgtgggttgggaccccttggggtcaaatgactctttcacagaggttgcccaagaccatcagaaaacacagatatttacattgcaattcataaagatagaaaaattacagtaatgaagtagcaatgaacataattttatggttgggggtcaccacaacagcagaaactgtattaaagggtggcagcattgggaaggttaagaaccactggcttagaaccaataaagatgctaaaaggtcttcattccagtgatcagtggtctgaaatgatcatcatcttaatacctattaatagttcatagccaacattttttcaaaaaataaatttgaggtcatttattcttttcatgagaacttttaactttaatactcttgtgttttcatacttttttgttgctgtttttggcttttgaagacagggtttctccgtgtagcagtcctgactttctagaacaggctttgtagaccaggctggccttgaacccacagagatctgcctgcctctgcctcccagtgctgggattaaaggcctgtgccaccaccgcctggtttatacattgttgtttgactagctggaaggaaacagggccagggatgctcatggcgctgctgggcttgaccaactatttcaacacaactccatatgttctctcagtgagtccatgtgctttctagaattcatgtttggaaaagcttcaagtgagcatagcaattttcataatgctgagactctcccaaggacaaaagtatcatccagagaatactaacttacctcttcaataatcttacgatcattgtttacataatcatgtaaagcaagagatctgacctatttatttttacatttttgttaggttgggccatgctgggcttgtgcgcttgaggggaatattcaaatctgcaagccttggcggttcaatttatttaactcatttaatagtttattaagactcattaaataattattaacaaatttgatcctggtcctttgaatgttccaaacactgtaggtagtatttgaaacatgattattccagttatatgccactgttttaacaaagtggggtccaaaaacccaaccacctgaacacatgcttaacttactacctcaaggagcaaaagggccatggggtagaccagattgaccagggagtccacagaagtgcttagcagtgtgaaaagcagagggggggggggaaggcacctttatcctatccttggtctccattgtcctcggtacaggcaacatttgagggttgaatgaagacaatgaggtgatgaagaaggaaagaaggcagccccccatccccaccgtgtgctggttccttccaggaaagtggctcatcttagaatcccaggatagtagcattgttttcctcccaagaacctgctttccaagacccagagttgtcctaaagatggattttattatcagcaactgggaagagactcagaaatgagaacatgagtccccttaagggcgaagcatagaggtggatagcagtgaaggctgatgcagtgccagccaacaagcctgtaggcaccaggcagctctcagagccacaacttggagagaaatcttgttttgtgcaatactacctctgcctttctccattgctgggtcagtctctggagctgtgtaagcctgggcctctgtatgcaatctggatggctctcctcacattattctgaacacacacacacacacacacacacacacacacacacacacacacacacacagagagagagagagagagagagagagaagagagcattattgctccggtctacagatgatgaaggagcattgggaattcagccacatgaaaatacagaaatcgagcctcctcaggccctcacgaagccttcaccagacacccaaaccactgccacctggttcttgtacttctcagtctcaagaactgtgacccacaaattactgttgtacatgaactcttcagtccagcatgctctaaagtggtactctccagccttgtatgcacatatgagtcacccctggagaattatttaaaagcaattccttcatcttccatcacacttacctctggaaaatggaatttagtggatctgggataaatctcttcccttgcgggcttaggggaactaagaaattaagaaactaaggattagtttctttggggtcaaatcattgggaaattgctcttcgggctacactctgtgcctggtttgaaagcttctgtgttaaaaatgaaggccatgggggtggggttcacagacaggtatggactttgagggaaggacatcaagtctcttagtcttccttctgttcctcttgtatagcatgggatcgataaatatttgttgaatgagtgaatga

SEQ ID NO: 14 - DNA, 2278 bp, Artificial sequence
  Synthetic sequence
cgcggtctctctttcctgccagctcctgctcagagttgtcagggtctgtctccgcgtcagtggtttccgtctccgcttccctgcctccatcgccccagcccttctgcaggtcctcctccgagacctcaaggagagctcagaagccagagacactagagccgaagtcatggaagaagtatcagcctgctccctcaacagcactctgttccagcaggaacaccagaaagggaccacctaccggattccagcgctgctctacatccctcccagccacaccttcctggcctttgcagagaagcgttcctcaagcaaagacgtagatgctctccacctggtgctcaggcgaggggtgatgaagggccactctgtagagtggggacccctgcagccactgatggaagccacattgcctgggcatcggaccatgaacccctgccctgtatgggagcagagtaccagccgtgtgttcctgtttttcatctgtgtgccagaccgtgttactgaacattggcagattaggtcaggcaagaatgccgcccgtctctgcttcctgtgcagtcaggatgctgggtgctcatggggtgaagtgaaggacttgactgaggaggtcattggctcagaggtgaagcactgggccacatttgctgtgggcccaggccatggcatccagctgcagtcaggaaggctgatcattcccacctacgcctactatttctcacacaggttcctctgcttcccgtgttcagtcaagccccattccctgatgatctacagtgatgacttaggagtcacatggcaccatggcaagctcattgggccccaggtgacaggggagtgccaagtggcagaagtgactgggacgtctggtaaccttgtgctctactgcaatgcccggacaccaaacagattccgagcagaatcttttagtactgattacggtgactgttttcagaaaccaaccctgaacacacaactctgtgagccccgctatggctgccaaggcagtatagtgagcttccagcccttgaagatgccattctcacaagacccaattggtaaagctgctcccactactcagaagagccctctgctggacagttttctggagcgggaggaaggagttggaagaccatcaggaacatggctcttgtactcacatccaactagcaagaagcggagaattaacctgggcatctactacaaccggaaccccttggaggtgacctgctggtcccgcccttggatcttgcactgtgggccctgtggctactctgatctggctgttgtggaagagcagggcttatttgcatgtttgtttgaatgtgggcaggagcatgagtgtgagcagattgccttccgtctattttcagtccaagaggttttgagctgtgaagactgcactggccctagtagggactaaagccaaatcaagcctgatgggtgaggacccaactttcctcagaagtgaatggcaactgcagctgggataacatgggtcactgatgtctacagaaaatccaaaaactaatacttcgctccttgtacttttcacttttccctttccaatgagccaagagaaatgtgtgccttatcttacacagcaataagggtgttgaactgggagtttggagacaatggtgtggttttggcttgctttaggactgtggatatatcccctgaactctgggcatcaggtctccatttgtaaaatgacaagggtggtttgtgatttcttgtcttcccattaaaaggagtgttcacttcttgtcccacaaaccctggattctgctcttgagtaaaagccatagacttatcttttcaaatgactcactactcacctgagtatgaggtgacatatagatgctttggccagaagaaagatcttcattgttgtttttaatcaggaaaatgcccttatccctctaatcatgcctggagctctgcatgttctctatcctgaaggactgagagcagaactgtgaagtcgctgctttccctagcattgctgctgggttcaacctccccttcctcctccagacatttcccagggcagaaaatgagaaacccaggccagctgcccttgatagcggtgcttattgcttttgataccattacctccattaaaggtgaatctgaggggactgaaagatggctcagtggttaagagcaccagctgctcttctaggggacctgggttctgttcccagcgctcccacttggcaactcctaactgtctaactccagttccagaggatccaatcccctccactggcctctg

SEQ ID NO: 15 - DNA, 3669 bp, Artificial sequence
  Synthetic sequence
ggttccatccaggctcatctactgctgatggagggggcctctgtgggagcctcatttagccttacactcactgtgatcaaagaaacttttccaacagtgaacaatattttaggaggcgataaaggtccagaacctgagtctgggtggaggttaaggcatggatctcaggcccatggcgacttgccctgtcctgcagaaggagacgctattccagacaggagactatgcttacagaatccctgctctgatctacctgtcaaagcagaagaccctgctggcctttgcggaaaagcgtctgaccaagacggatgagcatgcagatttgtttgtcctacgaagaggaagctacaatgcagacacccatcaggtccagtggcaagctgaggaggtggtgacccaagcctacctggagggccaccgctccatgagcccatgtcctttgtatgacaagcagacaaggacccttttccttttcttcatcgctgtccgtgggcaaatatcagaacaccaccagctccagactggggttaatgtcacacggctatgccacatcaccagtactgaccatgggaagacctggagcgctgtccaggaccttacagataccaccattggcagcacccatcaggattgggccacatttggcgtgggtcctgggcactgtctgcagctgcgaaacacagctgggagcctgctggtccctgcttatgcctatcggaaacaaccccctatccatgcacctgccccctctgccttctgcttcctcagccatgaccatgggagcacatgggagctgggccactttgtgtcccagaactcgctggagtgccaggtggctgaggttggcactggcgctgagagggtggtctatctcaatgctaggagctgcctgggagccagggtccaggcacaaagtcctaacagtggcctggatttccaggacaaccaggtagtgagtaaacttgtagagcctcccaaaggctgccatggaagtgtgattgctttccccaaccccacctcaaaggcagatgccttagatgtgtggctgctctatacccaccctacagactcccggaagaggaccaacctgggtgtgtacctcaatcagaagccactggaccccaccacctggtcagctcccaccctgttggcaacaggcatctgtgcctactcggacttgcagaacatggggcacggccctgatggctccccgcaatttgggtgtctgtatgagtcaaataactatgaagagattgttttcctcatgttcaccctgaagcaagctttcccagcagtgtttggtgcccagtgatcttgctgcatgcggcccaaagtgcttcaaaacacccatctttctttcctcccagcatcctctagacttttgagtccagctcttgggccccttctttgggagtatgcggagagcttgatctcctgactcttcatagacttcattgttccagcctccgaagtgggttctatttccagcccagaaatcaaaggaacctggctttctccagcctcttgacagggaaggtggggacaatgtacacagaggctgtcattctgtgtgtcggctgtcactatgctagcttagcctgcctgtttccccactcctagtttttggatgagtcttaataaattatccaacccagcctatttcttcctggaaaaatgttcagagtctccggggaaaggtttagctaaggatatgaattagcaaagacctcagtgtctctctctctctctctctctctctctctctctctctctctctctctctctttctgtgtgtgtgtgtgtgtgtgtatgtgtggtgtgtatgtgtgtccttgccaatgcattagagtagacagcatcagaacactttttgttttttaaacctgctaagtcattgtattaatcttcaaggaatgttctaacgaattacctccggctcaaaggtaggaaacaaaagttttgcaactctcaagcttgcaaaccatgttctctgagtgcctccagagcaaggttcccctcttgcttcctccacattctggtggcttccaacaattcctgccagttttcacagcttatggctgcatcactacctcacatggcttcttcctcctatgttctcccctctgtcactcaagacaaatgctggttggtttagaatccaccagatgacccagaacgggctcattcccaacacccttcatcacatcaacaaagatactgttcctacatcctgtcacattcacagagactgggtgttacttgtgtcttgggacccttactccacccactgcaggcatcctaaacatgttttttccatgcacatgatatagctgaaggtaggaaggtgattctgatggatcaatgaattcgaaagaatcaggggtgggcagggtggggtggggctgtaggatgagtatcagaagtgtagcactgctttgggatactcaagcctgtggtgatgggagagctgtgtggcagagaaggaagcgatcagggattctaagttaatgtagttcttatcacaaagaaacagccgagcggaggctctcccaggctgtctcaagggatgaccaatggaggagactagcatctgtttgatgtcctgggacggttagaggcctctgtgccctttgtgttaagagtcccatgccctatgaaaggcttgcccttgaccttaccagaccctctgtcatcacaccagtgacaccagttacaggtataactgagtgacatctttttttcagcaagtgtggaagtcagaggtgtgtgtttctttggaggagggcagtagagggcctattggaatgccgcctttccttgtgagggcttaatccagccagctagaaggaaaactagttcctctgttgggggattcccatctggtatttgaaaagcattcagagtagctaggatagatcctgggctgagcccaggagatggagggcttggaatgcaaccaggcagtgactctagagatgatgaagatagatgagcccacagtatactgtccagatccagataccctgagagtgcaagggtcctaataattatttcaccagtcaatagattttacccagggctgttctcaccaaactgggaggattaggggagccacacatctcttgagactgagaggtgtgacgagaccttgcaggttaagacatctttattcaaataataccggccaagcaaaagccagagcatgccgagaggcagcaagctagagaggccagagagagcttccacgtgtctcctgcaccttaagaacgccacatgcgtcatcctgagcatcccctggccatgtcctgacaggcgtggttaagcacatctgtggccagcccttaggaggcgtggttacggtgtctccctacagagaggcattctctgggcactacttggctattagaactccctggggagtttcccagcagtcctggtgccagggtctcaccaggtccaactgatgcagaatccctgacactgggaccccagggagtagtatttcatcaaaatctcaagttattctaatgaatgcaaggattgaaaagcactccctctagttttaaatacaaataccagtcttctagtttgaaaaaaatgatctggttaaagctgaactgatccattcaccaaaagatgccattaaaagagtgaaaacagaagctgtca

SEQ ID NO: 16 - DNA, 2003 bp, Artificial sequence
  Synthetic sequence
ggttccatccaggctcatctactgctgatggagggggcctctgtgggagcctcatttagccttacactcactgtgatcaaagaaacttttccaacagtgaacaatattttaggaggcgataaaggtccagaacctgagtctgggtggaggttaaggcatggatctcaggcccatggcgacttgccctgtcctgcagaaggagacgctattccagacaggagactatgcttacagaatccctgctctgatctacctgtcaaagcagaagaccctgctggcctttgcggaaaagcgtctgaccaagacggatgagcatgcagatttgtttgtcctacgaagaggaagctacaatgcagacacccatcaggtccagtggcaagctgaggaggtggtgacccaagcctacctggagggccaccgctccatgagcccatgtcctttgtatgacaagcagacaaggacccttttccttttcttcatcgctgtccgtgggcaaatatcagaacaccaccagctccagactggggttaatgtcacacggctatgccacatcaccagtactgaccatgggaagacctggagcgctgtccaggaccttacagataccaccattggcagcacccatcaggattgggccacatttggcgtgggtcctgggcactgtctgcagctgcgaaacacagctgggagcctgctggtccctgcttatgcctatcggaaacaaccccctatccatgcacctgccccctctgccttctgcttcctcagccatgaccatgggagcacatgggagctgggccactttgtgtcccagaactcgctggagtgccaggtggctgaggttggcactggcgctgagagggtggtctatctcaatgctaggagctgcctgggagccagggtccaggcacaaagtcctaacagtggcctggatttccaggacaaccaggtagtgagtaaacttgtagagcctcccaaaggctgccatggaagtgtgattgctttccccaaccccacctcaaaggcagatgccttagatgtgtggctgctctatacccaccctacagactcccggaagaggaccaacctgggtgtgtacctcaatcagaagccactggaccccaccacctggtcagctcccaccctgttggcaacaggcatctgtgcctactcggacttgcagaacatggggcacggccctgatggctccccgcaatttgggtgtctgtatgagtcaaataactatgaagagattgttttcctcatgttcaccctgaagcaagctttcccagcagtgtttggtgcccagtgatcttgctgcatgcggcccaaagtgcttcaaaacacccatctttctttcctcccagcatcctctagacttttgagtccagctcttgggccccttctttgggagtatgcggagagcttgatctcctgactcttcatagacttcattgttccagcctccgaagtgggttctatttccagcccagaaatcaaaggaacctggctttctccagcctcttgacagggaaggtggggacaatgtacacagaggctgtcattctgtgtgtcggctgtcactatgctagcttagcctgcctgtttccccactcctagtttttggatgagtcttaataaattatccaacccagcctatttcttcctggaaaaatgttcagagtctccggggaaaggtttagctaaggatatgaattagcaaagacctcagtgtctctctctctctctctctctctctctctctctctctctctctctctctctttctgtgtgtgtgtgtgtgtgtgtatgtgtggtgtgtatgtgtgtccttgccaatgcattagagtagacagcatcagaacactttttgttttttaaacctgctaagtcattgtattaatcttcaaggaatgttctaacgaattacctccggctcaaaggtaggaaacaaaagttttgcaactctcaagcttgcaaaccatgttctctgagtgcctcca

SEQ ID NO: 17 - DNA, 3202 bp, Artificial sequence
  Synthetic sequence
atggcgtcccttcctgtcctgcagaaggagagcgtgttccagtcgggagcccatgcctacagaatccctgccctgctctacctgcctgggcagcagtccctgctggccttcgcggaacagcgggcaagcaagaaggatgagcacgcagagctgattgtcctgcgcagaggagactacgacgcacccacccaccaggttcagtggcaagctcaggaggtggtggcccaggcccggctggatggccaccggtccatgaacccatgccccttgtatgacgcgcagacggggaccctcttcctcttcttcattgccatccctgggcaagtcacggagcaacagcagctgcagaccagggccaatgtgacgcggctgtgccaagtcaccagcactgaccacgggaggacctggagctcccccagagacctcactgatgcggccatcggcccagcctaccgggagtggtccacctttgcagtgggcccggggcattgtttgcagcttcacgacagggcccggagcctggtggtgcccgcctacgcctaccggaaacttcaccccatccaaaggccgatcccctctgccttctgcttcctcagccatgaccatgggcgcacgtgggcgcgagggcactttgtggcccaggacaccctggagtgccaggtggccgaagtcgagactggggagcagagggtggtgaccctcaacgcgagaagccacctccgagccagggtccaggcccagagcaccaatgacgggcttgatttccaggagtctcagctggtgaagaagctggtggagccgccgccccagggctgccaggggagcgtcatcagcttccccagcccccgctcggggcctggctccccagcccagtggctgctctacactcaccccacacactcctggcagagggccgacctgggtgcctacctcaacccgcgacctccagcccctgaggcctggtcagagccggtactgctggccaagggcagctgtgcctactcagacctccagagcatgggcaccggccctgatgggtcccccttgtttgggtgtctgtacgaagccaatgattacgaggagattgtctttctcatgttcaccctgaagcaagccttcccagctgagtacctgcctcagtgagcctgtggtgcccacctcaagggcctgcctttcacctgcacacccagctcggaggctctgcggctgcctctccttcccgtggcccctggacgtgggggccactctgggctcccttcggcgcccgtgtgtggagagaggtgcacctcttgctcttttcctcctgcgtggttccagtcttcccaaaaggttctattttcagcccagaaaccaaaagtgtctggcttcccatagcccctccatagggaaggcgtggagggtcctgcagcgcagctgtcaccttgtctgcctgtcccctacccccagctttgtgtaggtcttgacaaatttctagttcaactccttccttcttgggaaccattccttatgttcctggggaagaactgagatggaagaccatggtgtaaattagcagagatgtgtgtgtatctgtgtgtgtctgcatgtgcacgtgtgttcgtgtgtgtctatatgtgtctctgtgtgcatgtgtgttcgtgtgtgtccatgcatacgtgtttgtgcgtgttcatgtgtgtccgtgtgtctgcgtgtgcatgtgtgttcatgtgtgttcgggtgtgccatgtgtgcatgtgtgtttgcatgtgtgtttatgtgtgttcgtgtgagcctgcgtgtgcatgtgtgttcgtgtgtgtccatgtgtgcctgtgtgttcgcatgtgtgttcatgtgtgttcgttcatgtccacgtgtgtctgcacgtgcatgtgcgttcatgtgtgctagtgtgtgcataaatatgcatgcatgttcaagtgtgtccatgtgtgcttgtgtgcgcatgtgtgttcatctgtgttcgagtgcgtatatgcatgtgcatgtgtgttcatgtgcgtccatgtgtttgtgtgtgcccatgtgtctgcgtgcatgtgtgttcatgtatgtcagtgtgagtctgtgtgtgtatgtgtttgtgtctgtgtgtgcatgtgtgttcgtgtgtctatgtgtgactgtgtgtggatgtgtgtgcatgtgtgtccatgtgtgtctgcatgtgcatgtatttttgtgtgtgtgtctgtgtgtgcttgtgtgtccatgtgtgtctgcatgggcgtgtttttatgtgtgtgtctgtgtgtgcatgtgtgttcatgtgtgtccatgtgtgtctgcatgtgcatatgtttgtgtgtgtccatgtgcgtctgtgtgtgcctgtgtgttcgtgtgtctgtgtgtctgtgtgcatgtttgttcatgtgtgtgtatttgtgtatgtgtccttgccaatgctttggggcagacagcatggagaatagctttgcaggaagtaaggcatggtctgggaaaattaagcgagcttaagtcattgtattagcgtcttaaggctgctagaacaaagtaccttaatcttggtggcttaaagcagcagaaatttgttctctcaccgttctttctggaggccagaagcctgaaatcaacatgtctgagaggctctgtgccctctggagaccctggtgaggggggccttccctgcttcttccagcttctgccggctcccagcaacgctcgctggtccttgccttgtgatcgcatcactccagtccctgcctcgatcctcacgtggccacatctcctcctcctcctgtgtcttctcttctatgtttataaggacacttgtcactgactggatttagggcccactcacataattcggggtgattttttttttttgagacagagtcttgctctgttgcccagactagagtgcagtgtcaccatctcaactcactgcaacctttgcctctcgggttcaagcgattttcccgcttcagcctcccaagtagctgggattacaggcatgcaccatgatgcccagctaatttttgtgtttttagtagagacagggtttcaccatgttggccaggctggtgtcgaacttctggcctcaagtgatccactggcctcggcctcccaaagtgcagggattacaagcatgaaccactgcacccggcccaggaggatcttatttcccaagatcctgaacttaattacatttgcaaagacacttcttccaaataaa

SEQ ID NO: 18 - DNA, 5912 bp, Artificial sequence
  Synthetic sequence
agtcgacacgctcttcgcttctcggggcttgtctccgtgtcctccgtctcagttgtttctccctctctatcctcctctgtctcagtctccccagccttggggccggtgcctcttccgggcttcggcgaatgagacctgcggacctgcccccgcgccccatggaagaatccccggcgtccagctctgccccgacagagacggaggagccggggtccagtgcagaggtcatggaagaagtgacaacatgctccttcaacagccctctgttccggcaggaagatgacagagggattacctaccggatcccagccctgctctacataccccccacccacaccttcctggcctttgcagagaagcgttctacgaggagagatgaggatgctctccacctggtgctgaggcgagggttgaggattgggcagttggtacagtgggggcccctgaagccactgatggaagccacactaccggggcatcggaccatgaacccctgtcctgtatgggagcagaagagtggttgtgtgttcctgttcttcatctgtgtgcggggccatgtcacagagcgtcaacagattgtgtcaggcaggaatgctgcccgcctttgcttcatctacagtcaggatgctggatgttcatggagtgaggtgagggacttgactgaggaggtcattggctcagagctgaagcactgggccacatttgctgtgggcccaggtcatggcatccagctgcagtcagggagactggtcatccctgcgtatacctactacatcccttcctggttcttttgcttccagctaccatgtaaaaccaggcctcattctctgatgatctacagtgatgacctaggggtcacatggcaccatggtagactcattaggcccatggttacagtagaatgtgaagtggcagaggtgactgggagggctggccaccctgtgctatattgcagtgcccggacaccaaacaggtgccgggcagaggcgctcagcactgaccatggtgaaggctttcagagactggccctgagtcgacagctctgtgagcccccacatggttgccaagggagtgtggtaagtttccggcccctggagatcccacataggtgccaggactctagcagcaaagatgcacccaccattcagcagagctctccaggcagttcactgaggctggaggaggaagctggaacaccgtcagaatcatggctcttgtactcacacccaaccagtaggaaacagagggttgacctaggtatctatctcaaccagacccccttggaggctgcctgctggtcccgcccctggatcttgcactgtgggccctgtggctactctgatctggctgctctggaggaggagggcttgtttgggtgtttgtttgaatgtgggaccaagcaagagtgtgagcagattgccttccgcctgtttacacaccgggagatcctgagtcacctgcagggggactgcaccagccctggtaggaacccaagccaattcaaaagcaattaattggcttaggacccaatttccatagatgcaaatggcagttacagacaggttaacagaagctactgaagtctacagataatcaaaaaacttaatattctgttccctaccttttttcacttttcctcctccaaagagcaaaatgaaaattttgccttagctactgcagtggaaagagcactgaactaggagttggaagacaaggatgtggtcctggctctgccactggcttgcttttggaccttggatgtgtcacctgaactctctggacctcaggtttccatctgtaaaatgagagtattggttctaagatttctcatcttctcatccctaggacaagcatagtgcctgcatgcttcatgatcagtaagtcctggctgcataaaggactctgatgtcaaaatggaaaccaggggacttaccttttcacatgacttacccctcatccgagtgtgaggttacaagcaggtgtcatggcaggaaggaagaccagatctgtatgatttgttccatttttaataacaaaaatatccacacccttttaataatgctcagttctgtaggctctctatcctagaggaattgagcaaaacagaagaatcatgaagtctcctaccttctacagccttgtagttctgcttaccttctcttcctcatccagaaagcatcattttctagggagaacaatgagaatctcaatgccagtagtactggataatagtgcgtattgcttctggtggcattaccctgatgatgggctgaagttcatttattagggtggttcctgatgggaaaaggacatggattaggactttaaaacactggacagaatttcccacagtctttgccctcaaggagttcaccagtttatggggctagaagagcgagaaaattcaagaaaataaatgtagctggtgggagactttgtagatgttgggctatatgttggggtgatggtagctcctgatgtaattttcttagttgcatcttcaatatgcctggagtcgtctgtccaaggcttgtccaggcttctgggtttctctcaagtttgtttttctcaggatattgtcctggcccagctactcctttacctgtgagaagatcttcaccattaggaagatctctagacccccagatctcagaatcaggcctatttgtgtaggcccatggaaatcactacttgtgaagtagagatgcctttttgtctaatggttttcgtgctgaacttagttcatgctgagtctctcagatgataccacgttggttgttcctatcttagattgtttctcccatagcctgttattgcaacagaaattctatcatgagagatttatttttttgtccctattttaggagtctaatgcttaaactggtatcaactaaatatatttggtgttgtacaatgaccacagagaacaagtcttagtcatgaaatatagcctaggagactaggggttacagttgcactagttgggtagagagagtcctacaggataaaagtggagattaactttacctactttagcagattgcttaagccatggcttagagtggcttttaaaaatccccttagcctctcctacatttgccaaggtaatcttcccaatacacaattattcactcatgtatacatttatctaaatatttcttgagtgcctaatacaaggtactttctactgccattccttggctctaaatcatttgtggttctccattgcctattataatgtaaagatgtttacatttagcctggcatgtaggaccttccagctgttgggtgaaataatgcacactttcctctacttccttatatgaggcccactgtcagggaaaacctctgtcaagttggcaggtggagggtggtggaggtctagggatgggcaggattggtgcagggaggaattggggaaggggagaggattaaaagggcagccccctcctgagtggtagaaactccttgtttagcaaagctttcctgaacactgtactgcaagtggataggaatagggaggatggccaagtcgtacaaccagggctaaaggatgaaaagaatgagaatatcaacttctttttttttttttttgagacagaatctcactctgtcgcccaggctggagtacagtggcacaatctcagctcactgcagtctccgcctcctgggttcaagcaattctcctgcctcagcctcccaagtagctgggattacaggtgcctgccactacgcccagctaattttttgtatttttagtagagacggggtttcaccatgttggccaggcttgtctcgaactcctagccttgtgattcgcctgcctcggcctcccaaagtgctgggaatacaggcatgagctactgcgcccagccgagaatatcaacttctttaggactactcaagaagggagtcaaggcagggaccttggtctgtgccactgtgacgcagagatgtataataccagtactcataagaggtccatctctaaattgccctcctcttacttcttccccctgcctcatgttttttctctttaatgactagcatcgaaactctttaaatggggcaggcctgtgttcttatctcaggaatagtaagaaaagggggttgggaacaggggaaatccagaataaagacttgagaaaggaacagagtgggtgatggcagctatgaagaaaaaacagatcagaagaagagtcctggcaccttaggaagagaaagtgtcacagacacgaggcctaggctagagagatggtgtaggtggtagctgctgtgaagaagaaatgacaacaggctggagctgttccctgaaacctgtgggaaggaagagagacctgcacaggccggcacttagcttgtggagaaggtcctaactcaacactgcaactttaagctggcttaacttgtccaagttccagatgaccaacaaagacagctatagacactctaactctgtgccaattacccaaggccttcagggccctgggacctattccatgatagtggtaccctaactgaacccatttcagccactcagattgataggatggaaaagacagggcaggtggtagcagctgtgaagaaaagaggaaagcagaagggtggcctataatctacaggcatgtagagaggactacataggcctctgttctttgccctcaggagcccccttcctgtcccttggactcagaatggatccttccagcacacatggcccaacactgagagtgcaggaagcatgggtaggggcctcctgctgctggtatgtacccaggccagcctcctgccgacacagcctactggctgggttcatgttcttactattcacctcaggccattgtctgggtgcttaatttgacttgtttcccctggtcaccagtctcccctccgatattcacaggacatcaagcagcttcagccacgggtaagaggcttttcaccctgcctgttgggtagcccagaggacccacaaaggtcaacctgagtctccacagcctcctccccagggcagtaggaattgatatctcacttttgccagattaggcttctcactcttcttgagtaggccataatccacctcttcagtaggccatgcatcttgtctctgcagtgccagaattcacagtctgggcctccctttggtccttaccataggctgccatgtattattgtctatgttgtgccctgtaggcctctgctaggctgtgaactccttgactgactcctcactgtgtcctttttaccttgaatcacagtggcttatctaaaaatataagcttttttctgtcatattctgaattccctgaaggtaaggactatgtctgattcctctctttgtcctctgcacccagcgtagggcctgaaacagagtagctagcagtaaagatacactgaatgaatgaatgagtcaaccatccttggcctctggagctaattgagaaggctagggggagttccgctgtagggagaaggatgttgcatccctttgtagattgtgtagcattcaaaacctgctgaacactcaccctcaatgtatattctctgttctggcctgcttcaaggtcagttacactacttcctgggatgggcctttctctggcttaagcttggttgtccctggctttcccaaggatcacagcccaaaaggcacagtggggaaaatttatggcctattccagaagagtgagcagcctaatcaagccaagccttgatttggggttctcacttcactggtattttccctctgtccctaattgggttttctatagttactagttttccaggcctccaagggagattctgaggcttgatgtgttctgactgtgtcttggctttgtgatgctgagtgccagaaatactctgtactataaaaactaccatcgttctttgaaacaacaaagaggaataaa

SEQ ID NO: 19 - DNA, 3846 bp, Artificial sequence
  Synthetic sequence
atggctgcggtagcccggaccgctgtggccggaggtgcggaagatctggagcctcctgaggatgtggatgtctacattatagatgacaactttaccctaaggtggagcagcaagaaagagtcactgggcagtgtgaccttttcagcagaatatcaaatagacgagacggagaactggttaaaattgcctgggtgtcaacatgttacagggactgaatgcaaattctctttactgaacacaagtatgtatgtcaaaatgaagtttcgtgtaagagccgaaacaggaaagattgcttcttcatggactgaggttgacccattcattccatttctcagagctcacattggccccccaggagtacgtttagcagctgaagatcaagctgtaatagtctacatctctcatcccggacaaggtgggaagatgtggtcaagcgatattcttcgcttcgagtacagggtagtaatctggcagaagtcttccaatgagacacagagtattacaaccacttattatacagaaaagatttcaaaactgttgccagagactacttactgtttaaaagttaaagcaatacattcgtccctcgggaaacacagcaattatagtgcagtgcaatgtataaacaccacagaggccagtaagatgccagtgccggaaaacatagaagtggatgcccgtggtgagagctatgttctgaaatgggactgtgcgtctacagacgtgagcttcagagcgcagtggctccctggctattttaaaagtatttctggaagctcttcaaatgaatggaaaccaatacctacctgtgcagatgtccaaactacgcactgtgtctttcctaaaaacaccatccacacgggactgttctttctccgggtacaagcattcagtggaaaaagcacatctttttggtctgaagacaaattgattgattcccaaaaatacactaccattcctcctcccgtccttgctgtcacccctactagggattcattgcttgtctatgtcagctgtcaagacaattccagcagcaagtgtcatgggctaacttatgaaatcatcttttgggaaaagacttccagtactaagagaaatatggtgaaggaaagcccagagtttaccattgagaacctgcaaccacagactgtgtattgtgtacaagccagagttctcttgtttgccacgtggaacagaagcagcagcttcactgatgtgctgtgtgagaaaacaaggccaggacattcttcttccatgatctggatcataactggatttggcactctgtttttttctgtcttcatcctttatgccggaaagaacttcctgaaatacctcaattatgtgttcttttcatcgcccaagcctcccgccagtattgacgagtttttctctgagccgccttcaaagaaccttctgtttttgactcctgaggaacacactgagagatgcttcatcattgaaaacacagacactgttgctgtaacagaagaaaatcacactcccgaggaagaacacagaaagtacacttcgcagaccagccaggactcggggaactattctaatgaagaggaaaataccaccgggagcgaaagcagccaagggcttaggctagttccatgtcggagtccagggagcacgtcttgccctcctgggacctgtgagaggggtccgcttcttgggaaagcagaagcatcttcaaagcccagtcctgcaggcacagcagctctccagccctgactcggacggccatagtcgggcacaatgtgcactcctctgtgatgaggaaggcttaatggaaggtggctgcctgattctgctggcagctgaagtctccagtgctgtctcgggccacaggtgtgtccctgctgcacatggcctctggtcttctctctcggtgttcatattctaggagatatccagaacatacatttggctttttaatactgccatgccctaaggtgcctcagaggtactgttgtctacactagcacttcctaacacctggctttccacagcagtgccttctgcctagaactcagaagtcactgaagccgtggagaaaggggactcttcgtgagtcgagagtagctgcccttacagtgtaagatctcagtgcggcctgggtaagcacgttgcactctagtgcttgtaggacaagacagacgtggaatcagtcattcagtgaggaagacgaaccgtgtacagtctgcctttttattaacacccaatgctggtgtctatggctcttgtgtgttattttataacaccaggctgaccgctcctctccagcagtattcggagccctttcagcacccatgtgcttacagtgtcagctgctagggtgaaggaaggattttgattgtgtggtgctgtctgcgggtgcctgtaacaaacctgaaatggatgcccatgggtgtctttcgtaggcagacatctggcaaccccagtggctccaggttgactgtcagtccaggtgtggcaggacccagctgggtggtggcgccctcctttagtcccagcacttgggagacggaggcaggcagaacgggtgagaatggtgggcacagcctcaccccggtgtcctctgtactgtgctgctttaaccacccaggccagccccgcccatcctgtgttccccacggaagagctccttctgacaggacagcctacagagaagcaaggcctgtcaggaggtggggaagtgaaggccaggacatgaacatgaagtgttccatcccttacaagtacaaacacgggtcttcaggatgagacctcagaacaagtcctcggtggctgcagcaggtggggaggggacttcccttgcctattaaaccaaccacaaaggcagtcccaccccatgcctcttggtgcctactacaaacaggctgcctgctaagatgacagggttgtccttaggaatgccatgcaccccagcacccacatggtgggctcacaaatagctgtcacttaactttagacgatgcagcttgggctcctggttgcaccaggcatgagcaaggtgtactcacatgtaggcaagacacccatacacataaaagtaaaacctttaaacaattacagatctaaaaagaaatagcatgcacctgagggcgggcagactgagaatcatcggcagttcctggaggagctcagtgccgtctaagatgaacgtggacgtggtctcagtaacgtgtgtgcagatgtaaacagtgacaggcccatggactcatctacacgcacccacacaggtgacctggctacattccgttagtattgcctagagcccctgttagcggttgactctaaaatagagcagctgctccagaccagaatcaaagaaatctgtaacctataaaaaggttcatgtgacaaatagccaaggaacagcggtgcctgctgtgttcccttccctgagcagcacagcaggggcccattgtatgagcatgtgtataaagaacagagcctggcagacagctttgtatttctctttggggcggtgtcaccaaagccttccccacccctgctgtagccttgtgtccctggcgagcactgttcctgttcctttggagtccgttttcctctagtgcagaagcttccagctgggactgagttcctcactgtgccccagcccggtgctagtgcagcgctcagcacagagggcgctcggcacaggcagcgctcaggagccaccgaataagtgagatctgcagtcgaagccggtgtaggtgctagttggtttcggagggaaataaccatgtttttatgtttgtatgcaccaagtttgtatcttgcccttttgtgggcctgaggctcactgctgtaaaaacaattttacttaataaa

SEQ ID NO: 20 - DNA, 1938 bp, Artificial sequence
  Synthetic sequence
gcaactcaatagttgcatgcgatgtgagagcagagaaaggacttacagactcaccaggatgcttccgagccacgccttctccatcgtccgtttacttagcctgtgtctcgtggtgtgtgtgagcctacagttcacttcatcatctgtttttgaggattatccaaaggaatcttgcgatgtgaacctgacattacgtaatttccggctaattttatcgtgggaattaaaaaacaaatccatcccactaactcactatacgttttggttcacaatcatgagcaaaccagaagatccgaaggctttggagaactgtacgaatatcacagaaccatcttgcgacgtgacagaggagtggactggccccagtgagatctacgttcccctcattgtaatttacagaggcaactccacagtgagcctctgtgaaggctctgtcgtggctacagacactagagttgagccgccagaattcgaggttgttggcttcacagatcacataaatgtcacaatgaaatttccacctgtcacccccaagatattcggggagagcatatgggaaatgctaggttataagtcgcttgtcatcagagaacaggcgggacagagcatcaagctgcacaagcccacaatgaagagcatcactgggaacttcacctatgtccttcgagacttacttccaaagacaaactactgtgtatctgtttattttgaagctgaaaccctggagacctctataaagtctccctttaaatgcaccgcccttcagcctgaccaggaatcagggtcgtcagagtatgacaaagtaggaatagttactgggtgtgtgatagcagtgctcttcttcagcatcgtcgtaatgctgaaacggattggttacatatgcttaaaacacaatttccccaatgccttgaatttccataactttctgtcctggatattccctgaagtaccaccgtcagaaggagttgacaagttggagatcattccctcaagcaaaaagaagaaggtgtggaattatgactatggagatggaagtgacagtgatgaagacgtccccaaagcgagtgccactggttacaccacgcatggactcatgggcaggcttctgagccaggcctctgaccccgcaaaccaccccctggagtcccagcttgaagaagactcagccgctgaggaatctgatgccacggagcctgggactgagccagaactccccaccgaggctgtggtggggctgggcctcaggccttcagaagacccgagtggtccctatgagaggagagagagtgtgctccaggactccttccccggggatgacagcagctccgtgaatgggaccggggacaaagttatcttcaacgtgaacttaaattctgtgtttttgagagttctccatgatgactctgaagggggctcagaggtgtcatctctcgcagaagatccggtccacctagacgaggctccccacaggacagagtcaggccttccaatggccggtgaggacaggacacagtcacctcatcccagcgtctcttcacagggtctgtggactgaagatgggtcgtctgaaaaaactgacacctcagactcagatgctgacacaggggacggctatattatgagatgacactggaagctcaagctgagtgggcctcttcacagccagcctggataccttgtggcctgcaggtgtctgtgagggggggactagggaactctggagccctcctggttcttgctgatagtcttctctgtgcagattcccagtttggggatccattgttgtttacgtgggtcacgagcatgccccgcccacctccttcccagtgatgcactaaggcggtactgtgttatgtttcccagggaacagtgttcactgtgactttcagaggcagccaaggcctcccatccctgtgtcatatctaggaaatgattaaa

SEQ ID NO: 21 - DNA, 2755 bp, Artificial sequence
  Synthetic sequence
ttaggacggggcgatggcggctgagaggagctgcgcgtgcgcgaacatgtaactggtgggatctgcggcggctcccagatgatggtcgtcctcctgggcgcgacgaccctagtgctcgtcgccgtgggcccatgggtgttgtccgcagccgcaggtggaaaaaatctaaaatctcctcaaaaagtagaggtcgacatcatagatgacaactttatcctgaggtggaacaggagcgatgagtctgtcgggaatgtgactttttcattcgattatcaaaaaactgggatggataattggataaaattgtctgggtgtcagaatattactagtaccaaatgcaacttttcttcactcaagctgaatgtttatgaagaaattaaattgcgtataagagcagaaaaagaaaacacttcttcatggtatgaggttgactcatttacaccatttcgcaaagctcagattggtcctccagaagtacatttagaagctgaagataaggcaatagtgatacacatctctcctggaacaaaagatagtgttatgtgggctttggatggtttaagctttacatatagcttacttatctggaaaaactcttcaggtgtagaagaaaggattgaaaatatttattccagacataaaatttataaactctcaccagagactacttattgtctaaaagttaaagcagcactacttacgtcatggaaaattggtgtctatagtccagtacattgtataaagaccacagttgaaaatgaactacctccaccagaaaatatagaagtcagtgtccaaaatcagaactatgttcttaaatgggattatacatatgcaaacatgacctttcaagttcagtggctccacgcctttttaaaaaggaatcctggaaaccatttgtataaatggaaacaaatacctgactgtgaaaatgtcaaaactacccagtgtgtctttcctcaaaacgttttccaaaaaggaatttaccttctccgcgtacaagcatctgatggaaataacacatctttttggtctgaagagataaagtttgatactgaaatacaagctttcctacttcctccagtctttaacattagatcccttagtgattcattccatatctatatcggtgctccaaaacagtctggaaacacgcctgtgatccaggattatccactgatttatgaaattattttttgggaaaacacttcaaatgctgagagaaaaattatcgagaaaaaaactgatgttacagttcctaatttgaaaccactgactgtatattgtgtgaaagccagagcacacaccatggatgaaaagctgaataaaagcagtgtttttagtgacgctgtatgtgagaaaacaaaaccaggaaatacctctaaaatttggcttatagttggaatttgtattgcattatttgctctcccgtttgtcatttatgctgcgaaagtcttcttgagatgcatcaattatgtcttctttccatcacttaaaccttcttccagtatagatgagtatttctctgaacagccattgaagaatcttctgctttcaacttctgaggaacaaatcgaaaaatgtttcataattgaaaatataagcacaattgctacagtagaagaaactaatcaaactgatgaagatcataaaaaatacagttcccaaactagccaagattcaggaaattattctaatgaagatgaaagcgaaagtaaaacaagtgaagaactacagcaggactttgtatgaccagaaatgaactgtgtcaagtataaggtttttcagcaggagttacactgggagcctgaggtcctcaccttcctctcagtaactacagagaggacgtttcctgtttagggaaagaaaaaacatcttcagatcataggtcctaaaaatacgggcaagctcttaactatttaaaaatgaaattacaggcccgggcacggtggctcacacctgtaatcccagcactttgggaggctgaggcaggcagatcatgaggtcaagagatcgagaccagcctggccaacgtggtgaaaccccatctctactaaaaatacaaaaattagccgggtagtaggtaggcgcgcgcctgttgtcttagctactcaggaggctgaggcaggagaatcgcttgaaaacaggaggtggaggttgcagtgagccgagatcacgccactgcactccagcctggtgacagcgtgagactctttaaaaaaagaaattaaaagagttgagacaaacgtttcctacattcttttccatgtgtaaaatcatgaaaaagcctgtcaccggacttgcattggatgagatgagtcagaccaaaacagtggccacccgtcttcctcctgtgagcctaagtgcagccgtgctagctgcgcaccgtggctaaggatgacgtctgtgttcctgtccatcactgatgctgctggctactgcatgtgccacacctgtctgttcgccattcctaacattctgtttcattcttcctcgggagatatttcaaacatttggtcttttcttttaacactgagggtaggcccttaggaaatttatttaggaaagtctgaacacgttatcacttggttttctggaaagtagcttaccctagaaaacagctgcaaatgccagaaagatgatccctaaaaatgttgagggacttctgttcattcatcccgagaacattggcttccacatcacagtatctacccttacatggtttaggattaaagccaggcaatcttttactatg

SEQ ID NO: 22 - DNA, 4074 bp, Artificial sequence
  Synthetic sequence
gtatcgctcctcgtaggccggggctcggcgcgcgcacccgcactaaagacgcttcttcccggcgggtaggaatcccgccggcgagccgaacagttccccgagcgcagcccgcggaccaccacccggccgcacgggccgcttttgtcccccgcccgccgcttctgtccgagaggccgcccgcgaggcgcatcctgaccgcgagcgtcgggtcccagagccgggcgcggctggggcccgaggctagcatctctcgggagccgcaaggcgagagctgcaaagtttaattagacacttcagaattttgatcacctaatgttgatttcagatgtaaaagtcaagagaagactctaaaaatagcaaagatgcttttgagccagaatgccttcatcttcagatcacttaatttggttctcatggtgtatatcagcctcgtgtttggtatttcatatgattcgcctgattacacagatgaatcttgcactttcaagatatcattgcgaaatttccggtccatcttatcatgggaattaaaaaaccactccattgtaccaactcactatacattgctgtatacaatcatgagtaaaccagaagatttgaaggtggttaagaactgtgcaaataccacaagatcattttgtgacctcacagatgagtggagaagcacacacgaggcctatgtcaccgtcctagaaggattcagcgggaacacaacgttgttcagttgctcacacaatttctggctggccatagacatgtcttttgaaccaccagagtttgagattgttggttttaccaaccacattaatgtgatggtgaaatttccatctattgttgaggaagaattacagtttgatttatctctcgtcattgaagaacagtcagagggaattgttaagaagcataaacccgaaataaaaggaaacatgagtggaaatttcacctatatcattgacaagttaattccaaacacgaactactgtgtatctgtttatttagagcacagtgatgagcaagcagtaataaagtctcccttaaaatgcaccctccttccacctggccaggaatcagaatcagcagaatctgccaaaataggaggaataattactgtgtttttgatagcattggtcttgacaagcaccatagtgacactgaaatggattggttatatatgcttaagaaatagcctccccaaagtcttgaattttcataactttttagcctggccatttcctaacctgccaccgttggaagccatggatatggtggaggtcatttacatcaacagaaagaagaaagtgtgggattataattatgatgatgaaagtgatagcgatactgaggcagcgcccaggacaagtggcggtggctataccatgcatggactgactgtcaggcctctgggtcaggcctctgccacctctacagaatcccagttgatagacccggagtccgaggaggagcctgacctgcctgaggttgatgtggagctccccacgatgccaaaggacagccctcagcagttggaactcttgagtgggccctgtgagaggagaaagagtccactccaggacccttttcccgaagaggactacagctccacggaggggtctgggggcagaattaccttcaatgtggacttaaactctgtgtttttgagagttcttgatgacgaggacagtgacgacttagaagcccctctgatgctatcgtctcatctggaagagatggttgacccagaggatcctgataatgtgcaatcaaaccatttgctggccagcggggaagggacacagccaacctttcccagcccctcttcagagggcctgtggtccgaagatgctccatctgatcaaagtgacacttctgagtcagatgttgaccttggggatggttatataatgagatgactccaaaactattgaatgaacttggacagacaagcacctacagggttctttgtctctgcatcctaacttgctgccttatcgtctgcaagtgttctccaagggaaggaggaggaaactgtggtgttcctttcttccaggtgacatcacctatgcacattcccagtatggggaccatagtatcattcagtgcattgtttacatattcaaagtggtgcactttgaaggaagcacatgtgcacctttcctttacactaatgcacttaggatgtttctgcatcatgtctaccagggagcagggttccccacagtttcagaggtggtccaggaccctatgatatttctcttctttcgttcttttttttttttttttttgagacagagtctcgttctgtcgcccaagctggagcgcaatggtgtgatcttggctcactgcaacatccgcctcccaggttcaagtgattctcctgcctcagcctccctcgcaagtagctgggattacaggcgcctgccaccatgcctagcaaatttttgtatttttagtagagacaggattttaccatgttggccaggctggtctcaaactcctgacctcaagtgatctgccctcctcagcctcgtaaagtgctgggattacaggggtgagccgctgtgcctggctggccctgtgatatttctgtgaaataaattgggccagggtgggagcagggaaagaaaaggaaaatagtagcaagagctgcaaagcaggcaggaagggaggaggagagccaggtgagcagtggagagaaggggggccctgcacaaggaaacagggaagagccatcgaagtttcagtcggtgagccttgggcacctcacccatgtcacatcctgtctcctgcaattggaattccaccttgtccagccctccccagttaaagtggggaagacagactttaggatcacgtgtgtgactaatacagaaaggaaacatggcgtcggggagagggataaaacctgaatgccatattttaagttaaaaaaaaaaaaagcaaacacaaagatgcttcaagatcttcaggagaagtatggtatacaagtttcagggaccctatttgacaattttcagagtgctctctatgctgattccgagtcgagtgtgtcagctgtgattacagtgcctgtggatctaggccgggttgggggggtgtgggcgggggaagggaagtctggcccggagcaattgctcctgccggtaaccccagcactttgggatgcctaaacaggcgtatcgcttgaggccagtaattcgagaccagcctgggcaacatggcaaatctgtctctacaaaacaaaattagaaaaattaactgggcgtagtggcatgtgcctgttgtcccagctacttgggaggctgaggtgggagaatggcttgagcccaggaagcggaggttgcagtgagccaagatcatgtcactgcacttcagcctgggtgacagaaccagaccctgtctttaaaaagggagttggtggggagaggttctagaatgtcatgtagcaaccagtttaaggactgggactcagggatccaactcccacagtttccctgtgtgaccctaggcatttgacttagcctttctgagcctcaggttttttgtttctgaagtaaaaggattggactaggtaatctccaagatcctaggaacccaggagaaagatgagaaaatgtacaagaatgaacactcaggtggaaatgctgcaatcctgagaagctcccaggatgaatgaaaggcacaggacctcttacccctcacccctgcccccctcaagagctggtttctcaaacctttctcttaggccccttcaaagggggaaaactaaaaattatacaagttatagttcaaggactttaaatagattatttatatgattgctcataaggatgaggctgtgaggagggaacaccttatttaatctaatgaaattccataggaaagaggccttttgtatattgaatcaatttatctgccttctcagtgcatctgtcatattctgaaagattctgggttgatcttttgcgataacctctatggctgtgagtgtgtgtgtgtgtttgtgtattttttaacattttgtataatgattggaggttggtaaaaagtaacacaacagtacttttttaatacaaa

SEQ ID NO: 23 - DNA, 22 bp, Artificial sequence
  Synthetic sequence
ggaaaaacatccattctcattc

SEQ ID NO: 24 - DNA, 22 bp, Artificial sequence
  Synthetic sequence
ttaaattacataatgtggcagt

SEQ ID NO: 25 - DNA, 22 bp, Artificial sequence
  Synthetic sequence
tattttactgtgcatgggcttg

SEQ ID NO: 26 - DNA, 21 bp, Artificial sequence
  Synthetic sequence
tgaatctgttgattgcagtga

SEQ ID NO: 27 - DNA, 21 bp, Artificial sequence
  Synthetic sequence
ctgagatggtctgaactaaat

SEQ ID NO: 28 - DNA, 21 bp, Artificial sequence
  Synthetic sequence
agatataggcaccatgtttga

SEQ ID NO: 29 - DNA, 22 bp, Artificial sequence
  Synthetic sequence
ttggtcgtttatctcttccatc

SEQ ID NO: 30 - DNA, 22 bp, Artificial sequence
  Synthetic sequence
ttcatctacagtttggctgaaa

SEQ ID NO: 31 - DNA, 22 bp, Artificial sequence
  Synthetic sequence
ttaaattacacaatatggcagt

SEQ ID NO: 32 - DNA, 21 bp, Artificial sequence
  Synthetic sequence
ttcatctacagtttggctgaa

SEQ ID NO: 33 - DNA, 21 bp, Artificial sequence
  Synthetic sequence
accaattgaagcctatgtcag

SEQ ID NO: 34 - DNA, 21 bp, Artificial sequence
  Synthetic sequence
tgaatctgttgactggagtga

SEQ ID NO: 35 - DNA, 22 bp, Artificial sequence
  Synthetic sequence
ttaaacttcttgatttcccaaa

SEQ ID NO: 36 - DNA, 22 bp, Artificial sequence
  Synthetic sequence
ttcaagtaaaatgagtatgtga

SEQ ID NO: 37 - DNA, 22 bp, Artificial sequence
  Synthetic sequence
gagaaaaacaatctcaagactc

SEQ ID NO: 38 - DNA, 21 bp, Artificial sequence
  Synthetic sequence
tatggtcgatggtctcaggag

SEQ ID NO: 39 - DNA, 21 bp, Artificial sequence
  Synthetic sequence
aaacctgtggcccagctctta

SEQ ID NO: 40 - DNA, 21 bp, Artificial sequence
  Synthetic sequence
aaatcattcagaggagccttt

SEQ ID NO: 41 - DNA, 22 bp, Artificial sequence
  Synthetic sequence
tcctcttagatcatattccaag

SEQ ID NO: 42 - DNA, 22 bp, Artificial sequence
  Synthetic sequence
tcaattagtgggatcacaaccc

SEQ ID NO: 43 - DNA, 21 bp, Artificial sequence
  Synthetic sequence
ttaccaggaaagaccctggct

SEQ ID NO: 44 - DNA, 21 bp, Artificial sequence
  Synthetic sequence
tgtagaagacatcacttcatc

SEQ ID NO: 45 - DNA, 21 bp, Artificial sequence
  Synthetic sequence
aattagtgggatcacaaccca

SEQ ID NO: 46 - DNA, 22 bp, Artificial sequence
  Synthetic sequence
taaatgtctcttactgtcatga

SEQ ID NO: 47 - DNA, 22 bp, Artificial sequence
  Synthetic sequence
taaaacatcttgatttcacaaa

SEQ ID NO: 48 - DNA, 22 bp, Artificial sequence
  Synthetic sequence
aatttcaagtaaagtgaatgtg

SEQ ID NO: 49 - DNA, 22 bp, Artificial sequence
  Synthetic sequence
ttgttgtgtaacaacataattt

SEQ ID NO: 50 - DNA, 22 bp, Artificial sequence
  Synthetic sequence
ttcactactgtgctggccccgc

SEQ ID NO: 51 - DNA, 22 bp, Artificial sequence
  Synthetic sequence
tgggtctataagtagcacccag

SEQ ID NO: 52 - DNA, 22 bp, Artificial sequence
  Synthetic sequence
tattacttgtaaacactggttc

SEQ ID NO: 53 - DNA, 22 bp, Artificial sequence
  Synthetic sequence
ttgagttacaatgagacagctg

SEQ ID NO: 54 - DNA, 22 bp, Artificial sequence
  Synthetic sequence
tattctgaccaataaaagcaag

SEQ ID NO: 55 - DNA, 22 bp, Artificial sequence
  Synthetic sequence
ttttacctgaagaactagcagc

SEQ ID NO: 56 - DNA, 22 bp, Artificial sequence
  Synthetic sequence
catttgcttgatgtttttgttc

SEQ ID NO: 57 - DNA, 22 bp, Artificial sequence
  Synthetic sequence
tccttctccagtaccatcaacc

SEQ ID NO: 58 - DNA, 22 bp, Artificial sequence
  Synthetic sequence
aggtaactcttctacacacttg

SEQ ID NO: 59 - DNA, 22 bp, Artificial sequence
  Synthetic sequence
ttgtacttgaaaacttcacaga

SEQ ID NO: 60 - DNA, 22 bp, Artificial sequence
  Synthetic sequence
taattagtttttgtattggaag

SEQ ID NO: 61 - DNA, 22 bp, Artificial sequence
  Synthetic sequence
tggttttacctgaagaactagc

SEQ ID NO: 62 - DNA, 22 bp, Artificial sequence
  Synthetic sequence
aaatataaaaatactactctgc

SEQ ID NO: 63 - DNA, 22 bp, Artificial sequence
  Synthetic sequence
aattagaaatacacatatatcc

SEQ ID NO: 64 - DNA, 22 bp, Artificial sequence
  Synthetic sequence
tcctttcttgttaaccaagctc

SEQ ID NO: 65 - DNA, 23 bp, Artificial sequence
  Synthetic sequence
ctgctttagtgacatgctagtcc

SEQ ID NO: 66 - DNA, 21 bp, Artificial sequence
  Synthetic sequence
agtaccatcaacccagatata

SEQ ID NO: 67 - DNA, 21 bp, Artificial sequence
  Synthetic sequence
tacacgagtgccttaaattgg

SEQ ID NO: 68 - DNA, 21 bp, Artificial sequence
  Synthetic sequence
aaagtaacctttcttctcctg

SEQ ID NO: 69 - DNA, 22 bp, Artificial sequence
  Synthetic sequence
taaagtactagagccatcgaaa

SEQ ID NO: 70 - DNA, 22 bp, Artificial sequence
  Synthetic sequence
tacaccagcagaaaagtcgttg

SEQ ID NO: 71 - DNA, 22 bp, Artificial sequence
  Synthetic sequence
agttagacgtcgggcattgtcc

SEQ ID NO: 72 - DNA, 22 bp, Artificial sequence
  Synthetic sequence
ttgtacttgaaaacttcacata

SEQ ID NO: 73 - DNA, 22 bp, Artificial sequence
  Synthetic sequence
tatttaagtgggaacttgctga

SEQ ID NO: 74 - DNA, 22 bp, Artificial sequence
  Synthetic sequence
ttaatttttgtactggaagggc

SEQ ID NO: 75 - DNA, 22 bp, Artificial sequence
  Synthetic sequence
ttacaatcgggacaactgggag

SEQ ID NO: 76 - DNA, 22 bp, Artificial sequence
  Synthetic sequence
tcattgagaagacacgtgcgga

SEQ ID NO: 77 - DNA, 22 bp, Artificial sequence
  Synthetic sequence
aaaaaatttaatatcaaaaggc

SEQ ID NO: 78 - DNA, 22 bp, Artificial sequence
  Synthetic sequence
actttgaacatactgtacatgg

SEQ ID NO: 79 - DNA, 21 bp, Artificial sequence
  Synthetic sequence
catcgatccagatatacatgg

SEQ ID NO: 80 - DNA, 21 bp, Artificial sequence
  Synthetic sequence
tccattatccgtttacaggtg

SEQ ID NO: 81 - DNA, 21 bp, Artificial sequence
  Synthetic sequence
tgatgttggaggtttcatgga

SEQ ID NO: 82 - DNA, 22 bp, Artificial sequence
  Synthetic sequence
taactcatagatctaaagccaa

SEQ ID NO: 83 - DNA, 22 bp, Artificial sequence
  Synthetic sequence
tagagtacaacagttgcccagg

SEQ ID NO: 84 - DNA, 22 bp, Artificial sequence
  Synthetic sequence
ttgtttagaattatacaggggc

SEQ ID NO: 85 - DNA, 22 bp, Artificial sequence
  Synthetic sequence
ttagtttttggattttctgtag

SEQ ID NO: 86 - DNA, 22 bp, Artificial sequence
  Synthetic sequence
ttactcaagagcagaatccagg

SEQ ID NO: 87 - DNA, 22 bp, Artificial sequence
  Synthetic sequence
tttctgaaaacagtcaccgtaa

SEQ ID NO: 88 - DNA, 22 bp, Artificial sequence
  Synthetic sequence
ttaattctccgcttcttgctag

SEQ ID NO: 89 - DNA, 22 bp, Artificial sequence
  Synthetic sequence
ttcaggatagagaacatgcaga

SEQ ID NO: 90 - DNA, 22 bp, Artificial sequence
  Synthetic sequence
taatttattaagactcatccaa

SEQ ID NO: 91 - DNA, 22 bp, Artificial sequence
  Synthetic sequence
tacaagtttactcactacctgg

SEQ ID NO: 92 - DNA, 22 bp, Artificial sequence
  Synthetic sequence
atgaagtctatgaagagtcagg

SEQ ID NO: 93 - DNA, 22 bp, Artificial sequence
  Synthetic sequence
tatttgactcatacagacaccc

SEQ ID NO: 94 - DNA, 22 bp, Artificial sequence
  Synthetic sequence
taattcgttagaacattccttg

SEQ ID NO: 95 - DNA, 22 bp, Artificial sequence
  Synthetic sequence
taaaataacacacaagagccat

SEQ ID NO: 96 - DNA, 22 bp, Artificial sequence
  Synthetic sequence
ttgggtgttaataaaaaggcag

SEQ ID NO: 97 - DNA, 22 bp, Artificial sequence
  Synthetic sequence
ttaaacagtaagtagtctctgg

SEQ ID NO: 98 - DNA, 22 bp, Artificial sequence
  Synthetic sequence
ttcattttgacatacatacttg

SEQ ID NO: 99 - DNA, 22 bp, Artificial sequence
  Synthetic sequence
ttccacgtctgtcttgtcctac

SEQ ID NO: 100 - DNA, 22 bp, Artificial sequence
  Synthetic sequence
ttcagtgacttctgagttctag

SEQ ID NO: 101 - DNA, 22 bp, Artificial sequence
  Synthetic sequence
tagtgtagacaacagtacctct

SEQ ID NO: 102 - DNA, 22 bp, Artificial sequence
  Synthetic sequence
taaacaacaatggatccccaaa

SEQ ID NO: 103 - DNA, 22 bp, Artificial sequence
  Synthetic sequence
aagactatcagcaagaaccagg

SEQ ID NO: 104 - DNA, 22 bp, Artificial sequence
  Synthetic sequence
ttgaagataactttgtccccgg

SEQ ID NO: 105 - DNA, 22 bp, Artificial sequence
  Synthetic sequence
ttgctcatgattgtgaaccaaa

SEQ ID NO: 106 - DNA, 22 bp, Artificial sequence
  Synthetic sequence
taacacagtaccgccttagtgc

SEQ ID NO: 107 - DNA, 22 bp, Artificial sequence
  Synthetic sequence
aagactatcagcaagaaccagg

SEQ ID NO: 108 - DNA, 22 bp, Artificial sequence
  Synthetic sequence
gaatgagaatagatgtttttca

SEQ ID NO: 109 - DNA, 22 bp, Artificial sequence
  Synthetic sequence
actgccacatcatgtaatttac

SEQ ID NO: 110 - DNA, 22 bp, Artificial sequence
  Synthetic sequence
caagcccatgaacagtaaaatc

SEQ ID NO: 111 - DNA, 19 bp, Artificial sequence
  Synthetic sequence
tcactgcacaacagattca

SEQ ID NO: 112 - DNA, 19 bp, Artificial sequence
  Synthetic sequence
atttagttgaccatctcag

SEQ ID NO: 113 - DNA, 19 bp, Artificial sequence
  Synthetic sequence
tcaaacattgcctatatct

SEQ ID NO: 114 - DNA, 22 bp, Artificial sequence
  Synthetic sequence
gatggaagagctaaacgaccac

SEQ ID NO: 115 - DNA, 22 bp, Artificial sequence
  Synthetic sequence
tttcagccaacctgtagatgac

SEQ ID NO: 116 - DNA, 22 bp, Artificial sequence
  Synthetic sequence
actgccatatcgtgtaatttac

SEQ ID NO: 117 - DNA, 19 bp, Artificial sequence
  Synthetic sequence
ttcagccactgtagatgaa

SEQ ID NO: 118 - DNA, 19 bp, Artificial sequence
  Synthetic sequence
ctgacatacttcaattggt

SEQ ID NO: 119 - DNA, 19 bp, Artificial sequence
  Synthetic sequence
tcactccacaacagattca

SEQ ID NO: 120 - DNA, 22 bp, Artificial sequence
  Synthetic sequence
tttgggaaataaagaagtttac

SEQ ID NO: 121 - DNA, 22 bp, Artificial sequence
  Synthetic sequence
tcacatactccttttacttgac

SEQ ID NO: 122 - DNA, 22 bp, Artificial sequence
  Synthetic sequence
gagtcttgagcttgtttttcta

SEQ ID NO: 123 - DNA, 19 bp, Artificial sequence
  Synthetic sequence
ctcctgagcatcgaccata

SEQ ID NO: 124 - DNA, 19 bp, Artificial sequence
  Synthetic sequence
taagagctgccacaggttt

SEQ ID NO: 125 - DNA, 19 bp, Artificial sequence
  Synthetic sequence
aaaggctcctgaatgattt

SEQ ID NO: 126 - DNA, 22 bp, Artificial sequence
  Synthetic sequence
cttggaatataatctaagaggc

SEQ ID NO: 127 - DNA, 22 bp, Artificial sequence
  Synthetic sequence
gggttgtgataccactaattgc

SEQ ID NO: 128 - DNA, 19 bp, Artificial sequence
  Synthetic sequence
agccagggtttcctggtaa

SEQ ID NO: 129 - DNA, 19 bp, Artificial sequence
  Synthetic sequence
gatgaagttgtcttctaca

SEQ ID NO: 130 - DNA, 19 bp, Artificial sequence
  Synthetic sequence
tgggttgttcccactaatt

SEQ ID NO: 131 - DNA, 22 bp, Artificial sequence
  Synthetic sequence
tcatgacagtcagagacatttc

SEQ ID NO: 132 - DNA, 22 bp, Artificial sequence
  Synthetic sequence
tttgtgaaataaagatgttttc

SEQ ID NO: 133 - DNA, 22 bp, Artificial sequence
  Synthetic sequence
cacattcactctacttgaaatc

SEQ ID NO: 134 - DNA, 22 bp, Artificial sequence
  Synthetic sequence
aaattatgttattacacaacac

SEQ ID NO: 135 - DNA, 22 bp, Artificial sequence
  Synthetic sequence
gcggggccagaacagtagtgac

SEQ ID NO: 136 - DNA, 22 bp, Artificial sequence
  Synthetic sequence
ctgggtgctaattatagacccc

SEQ ID NO: 137 - DNA, 22 bp, Artificial sequence
  Synthetic sequence
gaaccagtgtctacaagtaatc

SEQ ID NO: 138 - DNA, 22 bp, Artificial sequence
  Synthetic sequence
cagctgtctccttgtaactcac

SEQ ID NO: 139 - DNA, 22 bp, Artificial sequence
  Synthetic sequence
cttgcttttactggtcagaatc

SEQ ID NO: 140 - DNA, 22 bp, Artificial sequence
  Synthetic sequence
gctgctagttattcaggtaaac

SEQ ID NO: 141 - DNA, 22 bp, Artificial sequence
  Synthetic sequence
gaacaaaaacctcaagcaaata

SEQ ID NO: 142 - DNA, 22 bp, Artificial sequence
  Synthetic sequence
ggttgatggtcctggagaaggc

SEQ ID NO: 143 - DNA, 22 bp, Artificial sequence
  Synthetic sequence
caagtgtgtagacgagttaccc

SEQ ID NO: 144 - DNA, 22 bp, Artificial sequence
  Synthetic sequence
tctgtgaagtcttcaagtacac

SEQ ID NO: 145 - DNA, 22 bp, Artificial sequence
  Synthetic sequence
cttccaataccaaaactaattc

SEQ ID NO: 146 - DNA, 22 bp, Artificial sequence
  Synthetic sequence
gctagttcttaaggtaaaaccc

SEQ ID NO: 147 - DNA, 22 bp, Artificial sequence
  Synthetic sequence
gcagagtagtctttttatattc

SEQ ID NO: 148 - DNA, 22 bp, Artificial sequence
  Synthetic sequence
ggatatatgtatatttctaatc

SEQ ID NO: 149 - DNA, 22 bp, Artificial sequence
  Synthetic sequence
gagcttggttcacaagaaaggc

SEQ ID NO: 150 - DNA, 23 bp, Artificial sequence
  Synthetic sequence
ggactagcatgacactaaagcaa

SEQ ID NO: 151 - DNA, 19 bp, Artificial sequence
  Synthetic sequence
tatatctgttgatggtact

SEQ ID NO: 152 - DNA, 19 bp, Artificial sequence
  Synthetic sequence
ccaatttagcactcgtgta

SEQ ID NO: 153 - DNA, 19 bp, Artificial sequence
  Synthetic sequence
caggagaaaaggttacttt

SEQ ID NO: 154 - DNA, 22 bp, Artificial sequence
  Synthetic sequence
tttcgatggccctagtactttc

SEQ ID NO: 155 - DNA, 22 bp, Artificial sequence
  Synthetic sequence
caacgactttcctgctggtgtc

SEQ ID NO: 156 - DNA, 22 bp, Artificial sequence
  Synthetic sequence
ggacaatgccagacgtctaacc

SEQ ID NO: 157 - DNA, 22 bp, Artificial sequence
  Synthetic sequence
tatgtgaagtcttcaagtacac

SEQ ID NO: 158 - DNA, 22 bp, Artificial sequence
  Synthetic sequence
tcagcaagttaccacttaaatc

SEQ ID NO: 159 - DNA, 22 bp, Artificial sequence
  Synthetic sequence
gcccttccagcacaaaaattac

SEQ ID NO: 160 - DNA, 22 bp, Artificial sequence
  Synthetic sequence
ctcccagttgccccgattgtac

SEQ ID NO: 161 - DNA, 22 bp, Artificial sequence
  Synthetic sequence
tccgcacgtgccttctcaatgc

SEQ ID NO: 162 - DNA, 22 bp, Artificial sequence
  Synthetic sequence
gccttttgatcttaaatttttc

SEQ ID NO: 163 - DNA, 22 bp, Artificial sequence
  Synthetic sequence
ccatgtacagcatgttcaaagc

SEQ ID NO: 164 - DNA, 19 bp, Artificial sequence
  Synthetic sequence
ccatgtatctggatcgatg

SEQ ID NO: 165 - DNA, 19 bp, Artificial sequence
  Synthetic sequence
cacctgtacggataatgga

SEQ ID NO: 166 - DNA, 19 bp, Artificial sequence
  Synthetic sequence
tccatgaactccaacatca

SEQ ID NO: 167 - DNA, 22 bp, Artificial sequence
  Synthetic sequence
ttggctttagctctatgagttc

SEQ ID NO: 168 - DNA, 22 bp, Artificial sequence
  Synthetic sequence
cctgggcaaccgttgtactctc

SEQ ID NO: 169 - DNA, 22 bp, Artificial sequence
  Synthetic sequence
gcccctgtatcattctaaacac

SEQ ID NO: 170 - DNA, 22 bp, Artificial sequence
  Synthetic sequence
ctacagaaaacccaaaaactac

SEQ ID NO: 171 - DNA, 22 bp, Artificial sequence
  Synthetic sequence
cctggattctactcttgagtac

SEQ ID NO: 172 - DNA, 22 bp, Artificial sequence
  Synthetic sequence
ttacggtgaccgttttcagaac

SEQ ID NO: 173 - DNA, 22 bp, Artificial sequence
  Synthetic sequence
ctagcaagaaacggagaattac

SEQ ID NO: 174 - DNA, 22 bp, Artificial sequence
  Synthetic sequence
tctgcatgttatctatcctgac

SEQ ID NO: 175 - DNA, 22 bp, Artificial sequence
  Synthetic sequence
ttggatgagtattaataaattc

SEQ ID NO: 176 - DNA, 22 bp, Artificial sequence
  Synthetic sequence
ccaggtagtgcgtaaacttgtc

SEQ ID NO: 177 - DNA, 22 bp, Artificial sequence
  Synthetic sequence
cctgactcttaatagacttcac

SEQ ID NO: 178 - DNA, 22 bp, Artificial sequence
  Synthetic sequence
gggtgtctgtctgagtcaaatc

SEQ ID NO: 179 - DNA, 22 bp, Artificial sequence
  Synthetic sequence
caaggaatgtcctaacgaattc

SEQ ID NO: 180 - DNA, 22 bp, Artificial sequence
  Synthetic sequence
atggctcttgagtgttattttc

SEQ ID NO: 181 - DNA, 22 bp, Artificial sequence
  Synthetic sequence
ctgcctttttcttaacacccac

SEQ ID NO: 182 - DNA, 22 bp, Artificial sequence
  Synthetic sequence
ccagagactaattactgtttac

SEQ ID NO: 183 - DNA, 22 bp, Artificial sequence
  Synthetic sequence
caagtatgtacgtcaaaatgac

SEQ ID NO: 184 - DNA, 22 bp, Artificial sequence
  Synthetic sequence
gtaggacaagccagacgtggac

SEQ ID NO: 185 - DNA, 22 bp, Artificial sequence
  Synthetic sequence
ctagaactcaaaagtcactgac

SEQ ID NO: 186 - DNA, 22 bp, Artificial sequence
  Synthetic sequence
agaggtactgctgtctacactc

SEQ ID NO: 187 - DNA, 22 bp, Artificial sequence
  Synthetic sequence
tttggggatcaattgttgtttc

SEQ ID NO: 188 - DNA, 22 bp, Artificial sequence
  Synthetic sequence
cctggttcttactgatagtctc

SEQ ID NO: 189 - DNA, 22 bp, Artificial sequence
  Synthetic sequence
ccggggacaacgttatcttcac

SEQ ID NO: 190 - DNA, 22 bp, Artificial sequence
  Synthetic sequence
tttggttcaccatcatgagcac

SEQ ID NO: 191 - DNA, 22 bp, Artificial sequence
  Synthetic sequence
gcactaaggcagtactgtgttc

SEQ ID NO: 192 - DNA, 22 bp, Artificial sequence
  Synthetic sequence
cctggttcttactgatagtctc

SEQ ID NO: 193 - DNA, 442 bp, Artificial sequence
  Synthetic sequence
atctgatcttctgaagaaaatatatttctttttattcatagctcttaactagtggtgatagcaatgtcagcagtgcctggaaaaacatccattctcattcgtgaagccacagatggaatgagaatagatgtttttcaaagtaaggttgaccatactctactctagactagtggtgatagcaatgtcagcagtgcctttaaattacataatgtggcagtgtgaagccacagatgactgccacatcatgtaatttacaagtaaggttgaccatactctactctagactagtggtgatagcaatgtcagcagtgccttattttactgtgcatgggcttggtgaagccacagatgcaagcccatgaacagtaaaatcaagtaaggttgaccatactctactctagtcagttttattgatagtcttttcagtattattgataatctt

SEQ ID NO: 194 - DNA, 523 bp, Artificial sequence
  Synthetic sequence
atctgatcttctgaagaaaatatatttctttttattcatagctcttaactagtggtgatagcaatgtcagcagtgcctggaaaaacatccattctcattcgtgaagccacagatggaatgagaatagatgtttttcaaagtaaggttgaccatactctactctagttatattctttaggcacgaatgtgtgtttaaaaaaaataaaaactagtggtgatagcaatgtcagcagtgcctttaaattacataatgtggcagtgtgaagccacagatgactgccacatcatgtaatttacaagtaaggttgaccatactctactctagagttgtgttttaatgtatattaatgttactaatgtgtttactagtggtgatagcaatgtcagcagtgccttattttactgtgcatgggcttggtgaagccacagatgcaagcccatgaacagtaaaatcaagtaaggttgaccatactctactctagtcagttttattgatagtcttttcagtattattgataatctt

SEQ ID NO: 195 - DNA, 681 bp, Artificial sequence
  Synthetic sequence
aattcacagactttcctcatgaaaccagctcatctgagaaaacagcaaagtttaaaaaagaaatactatcagtgctgcaaaccaggaaggggaagtgtgtggtttaagttgcatatcccttatcctctggctgctggaggcttgctgaaggctgtatgctgtgaatctgttgattgcagtgagttttggccactgactgactcactgcacaacagattcacaggacacaaggcctgttactagcactcacatggaacaaatggcccagatcctggaggcttgctgaaggctgtatgctgctgagatggtctgaactaaatgttttggccactgactgacatttagttgaccatctcagcaggacacaaggcctgttactagcactcacatggaacaaatggcccagatcctggaggcttgctgaaggctgtatgctgagatataggcaccatgtttgagttttggccactgactgactcaaacattgcctatatctcaggacacaaggcctgttactagcactcacatggaacaaatggcccaggacacaaggcctgttactagcactcacatggaacaaatggccaccgtgggaggatgacaagtccaagagtcaccctgctggatgaacgtagatgtcagactctatcatttaatgtgctagtcataacctggttacta

SEQ ID NO: 196 - DNA, 405 bp, Artificial sequence
  Synthetic sequence
atctgatcttctgaagaaaatatatttctttttattcatagctcttaactagtggtgatagcaatgtcagcagtgcctggaaaaacatccattctcattcgtgaagccacagatggaatgagaatagatgtttttcaaagtaaggttgaccatactctactctagttatattctttaggcacgaatgtgtgtttaaaaaaaataaaaactagtggtgatagcaatgtcagcagtgcctttaaattacataatgtggcagtgtgaagccacagatgactgccacatcatgtaatttacaagtaaggttgaccatactctactctagagttgtgttttaatgtatattaatgttactaatgtgttttcagttttattgatagtcttttcagtattattgataatctt

SEQ ID NO: 197 - DNA, 245 bp, Artificial sequence
  Synthetic sequence
atctgatcttctgaagaaaatatatttctttttattcatagctcttaactagtggtgatagcaatgtcagcagtgcctggaaaaacatccattctcattcgtgaagccacagatggaatgagaatagatgtttttcaaagtaaggttgaccatactctactctagagttgtgttttaatgtatattaatgttactaatgtgttttcagttttattgatagtcttttcagtattattgataatctt

SEQ ID NO: 198 - DNA, 957 bp, Artificial sequence
  Synthetic sequence
aattcacagactttcctcatgaaaccagctcatctgagaaaacagcaaagtttaaaaaagaaatactatcagtgctgcaaaccaggaaggggaagtgtgtggtttaagttgcatatcccttatcctctggctgctggaggcttgctgaaggctgtatgctgttaccaggaaagaccctggctgttttggccactgactgacagccagggtttcctggtaacaggacacaaggcctgttactagcactcacatggaacaaatggcccagatcctggaggcttgctgaaggctgtatgctgaaacctgtggcccagctcttagttttggccactgactgactaagagctgccacaggtttcaggacacaaggcctgttactagcactcacatggaacaaatggcccagatcctggaggcttgctgaaggctgtatgctgaaatcattcagaggagcctttgttttggccactgactgacaaaggctcctgaatgatttcaggacacaaggcctgttactagcactcacatggaacaaatggcccagatcctggaggcttgctgaaggctgtatgctgtgtagaagacatcacttcatcgttttggccactgactgacgatgaagttgtcttctacacaggacacaaggcctgttactagcactcacatggaacaaatggcccagatcctggaggcttgctgaaggctgtatgctgtgaatctgttgattgcagtgagttttggccactgactgactcactgcacaacagattcacaggacacaaggcctgttactagcactcacatggaacaaatggcccaggacacaaggcctgttactagcactcacatggaacaaatggccaccgtgggaggatgacaagtccaagagtcaccctgctggatgaacgtagatgtcagactctatcatttaatgtgctagtcataacctggttacta

SEQ ID NO: 199 - DNA, 839 bp, Artificial sequence
  Synthetic sequence
atctgatcttctgaagaaaatatatttctttttattcatagctcttaactagtggtgatagcaatgtcagcagtgcctttaaacttcttgatttcccaaagtgaagccacagatgtttgggaaataaagaagtttacaagtaaggttgaccatactctactctagttatattctttaggcacgaatgtgtgtttaaaaaaaataaaaactagtggtgatagcaatgtcagcagtgccttcctcttagatcatattccaaggtgaagccacagatgcttggaatataatctaagaggcaagtaaggttgaccatactctactctagagttgtgttttaatgtatattaatgttactaatgtgtttactagtggtgatagcaatgtcagcagtgcctttcaagtaaaatgagtatgtgagtgaagccacagatgtcacatactccttttacttgacaagtaaggttgaccatactctactctaggttatttttagtatgattctgtaaaaatgaattaatactaactagtggtgatagcaatgtcagcagtgccttcaattagtgggatcacaacccgtgaagccacagatggggttgtgataccactaattgcatttttcagatgtatcatctcttaaaatactgtaattgcaactagtggtgatagcaatgtcagcagtgcctttaaattacataatgtggcagtgtgaagccacagatgactgccacatcatgtaatttacaagtaaggttgaccatactctactctagaagtaaggttgaccatactctactctagtcagttttattgatagtcttttcagtattattgataatctt

SEQ ID NO: 200 - DNA, 681 bp, Artificial sequence
  Synthetic sequence
atctgatcttctgaagaaaatatatttctttttattcatagctcttaactagtggtgatagcaatgtcagcagtgcctttaaacttcttgatttcccaaagtgaagccacagatgtttgggaaataaagaagtttacaagtaaggttgaccatactctactctagttatattctttaggcacgaatgtgtgtttaaaaaaaataaaaactagtggtgatagcaatgtcagcagtgccttcctcttagatcatattccaaggtgaagccacagatgcttggaatataatctaagaggcaagtaaggttgaccatactctactctagagttgtgttttaatgtatattaatgttactaatgtgtttactagtggtgatagcaatgtcagcagtgcctttcaagtaaaatgagtatgtgagtgaagccacagatgtcacatactccttttacttgacaagtaaggttgaccatactctactctaggttatttttagtatgattctgtaaaaatgaattaatactaactagtggtgatagcaatgtcagcagtgccttcaattagtgggatcacaacccgtgaagccacagatggggttgtgataccactaattgcaagtaaggttgaccatactctactctagtcagttttattgatagtcttttcagtattattgataatctt

SEQ ID NO: 201 - DNA, 774 bp, Artificial sequence
  Synthetic sequence
aattcacagactttcctcatgaaaccagctcatctgagaaaacagcaaagtttaaaaaagaaatactatcagtgctgcaaaccaggaaggggaagtgtgtggtttaagttgcatatcccttatcctctggctgctggaggcttgctgaaggctgtatgctgttaccaggaaagaccctggctgttttggccactgactgacagccagggtttcctggtaacaggacacaaggcctgttactagcactcacatggaacaaatggcccagatcctggaggcttgctgaaggctgtatgctgaaacctgtggcccagctcttagttttggccactgactgactaagagctgccacaggtttcaggacacaaggcctgttactagcactcacatggaacaaatggcccagatcctggaggcttgctgaaggctgtatgctgaaatcattcagaggagcctttgttttggccactgactgacaaaggctcctgaatgatttcaggacacaaggcctgttactagcactcacatggaacaaatggcccagatcctggaggcttgctgaaggctgtatgctgtgtagaagacatcacttcatcgttttggccactgactgacgatgaagttgtcttctacacaggacacaaggcctgttactagcactcacatggaacaaatggccaccgtgggaggatgacaagtccaagagtcaccctgctggatgaacgtagatgtcagactctatcatttaatgtgctagtcataacctggttacta

SEQ ID NO: 202 - DNA, 521 bp, Artificial sequence
  Synthetic sequence
atctgatcttctgaagaaaatatatttctttttattcatagctcttaactagtggtgatagcaatgtcagcagtgcctttggtcgtttatctcttccatcgtgaagccacagatggatggaagagctaaacgaccacaagtaaggttgaccatactctactctagagttgtgttttaatgtatattaatgttactaatgtgtttactagtggtgatagcaatgtcagcagtgcctttcatctacagtttggctgaaagtgaagccacagatgtttcagccaacctgtagatgacaagtaaggttgaccatactctactctaggttatttttagtatgattctgtaaaaatgaattaatactaactagtggtgatagcaatgtcagcagtgcctttaaattacacaatatggcagtgtgaagccacagatgactgccatatcgtgtaatttacaagtaaggttgaccatactctactctagtcagttttattgatagtcttttcagtattattgataatctt

SEQ ID NO: 203 - DNA, 839 bp, Artificial sequence
  Synthetic sequence
atctgatcttctgaagaaaatatatttctttttattcatagctcttaactagtggtgatagcaatgtcagcagtgccttaaaacatcttgatttcacaaagtgaagccacagatgtttgtgaaataaagatgttttcaagtaaggttgaccatactctactctagttatattctttaggcacgaatgtgtgtttaaaaaaaataaaaactagtggtgatagcaatgtcagcagtgccttattacttgtaaacactggttcgtgaagccacagatggaaccagtgtctacaagtaatcaagtaaggttgaccatactctactctagagttgtgttttaatgtatattaatgttactaatgtgtttactagtggtgatagcaatgtcagcagtgcctttcatctacagtttggctgaaagtgaagccacagatgtttcagccaacctgtagatgacaagtaaggttgaccatactctactctaggttatttttagtatgattctgtaaaaatgaattaatactaactagtggtgatagcaatgtcagcagtgcctttgttgtgtaacaacataatttgtgaagccacagatgaaattatgttattacacaacacatttttcagatgtatcatctcttaaaatactgtaattgcaactagtggtgatagcaatgtcagcagtgcctttcactactgtgctggccccgcgtgaagccacagatggcggggccagaacagtagtgacaagtaaggttgaccatactctactctagaagtaaggttgaccatactctactctagtcagttttattgatagtcttttcagtattattgataatctt

SEQ ID NO: 204 - DNA, 681 bp, Artificial sequence
  Synthetic sequence
atctgatcttctgaagaaaatatatttctttttattcatagctcttaactagtggtgatagcaatgtcagcagtgccttaaaacatcttgatttcacaaagtgaagccacagatgtttgtgaaataaagatgttttcaagtaaggttgaccatactctactctagttatattctttaggcacgaatgtgtgtttaaaaaaaataaaaactagtggtgatagcaatgtcagcagtgccttattacttgtaaacactggttcgtgaagccacagatggaaccagtgtctacaagtaatcaagtaaggttgaccatactctactctagagttgtgttttaatgtatattaatgttactaatgtgtttactagtggtgatagcaatgtcagcagtgcctttcactactgtgctggccccgcgtgaagccacagatggcggggccagaacagtagtgacaagtaaggttgaccatactctactctaggttatttttagtatgattctgtaaaaatgaattaatactaactagtggtgatagcaatgtcagcagtgcctttgttgtgtaacaacataatttgtgaagccacagatgaaattatgttattacacaacacaagtaaggttgaccatactctactctagtcagttttattgatagtcttttcagtattattgataatctt

SEQ ID NO: 205 - DNA, 521 bp, Artificial sequence
  Synthetic sequence
atctgatcttctgaagaaaatatatttctttttattcatagctcttaactagtggtgatagcaatgtcagcagtgccttgaatcatcatgatagccgcttgtgaagccacagatgaagcggctataatgatgattccaagtaaggttgaccatactctactctagagttgtgttttaatgtatattaatgttactaatgtgtttactagtggtgatagcaatgtcagcagtgccttcttgtgtgttcattatcctaggtgaagccacagatgctaggataataaacacacaagcaagtaaggttgaccatactctactctaggttatttttagtatgattctgtaaaaatgaattaatactaactagtggtgatagcaatgtcagcagtgccttatttcttcacaatgagcactcgtgaagccacagatggagtgctcatcgtgaagaaatcaagtaaggttgaccatactctactctagtcagttttattgatagtcttttcagtattattgataatctt

SEQ ID NO: 206 - DNA, 681 bp, Artificial sequence
  Synthetic sequence
atctgatcttctgaagaaaatatatttctttttattcatagctcttaactagtggtgatagcaatgtcagcagtgccttcatccatagaaaactcctcgggtgaagccacagatgccgaggagttctctatggatgcaagtaaggttgaccatactctactctagttatattctttaggcacgaatgtgtgtttaaaaaaaataaaaactagtggtgatagcaatgtcagcagtgccttgaatcatcatgatagccgcttgtgaagccacagatgaagcggctataatgatgattccaagtaaggttgaccatactctactctagagttgtgttttaatgtatattaatgttactaatgtgtttactagtggtgatagcaatgtcagcagtgccttcttgtgtgttcattatcctaggtgaagccacagatgctaggataataaacacacaagcaagtaaggttgaccatactctactctaggttatttttagtatgattctgtaaaaatgaattaatactaactagtggtgatagcaatgtcagcagtgccttatttcttcacaatgagcactcgtgaagccacagatggagtgctcatcgtgaagaaatcaagtaaggttgaccatactctactctagtcagttttattgatagtcttttcagtattattgataatctt

SEQ ID NO: 207 - DNA, 839 bp, Artificial sequence
  Synthetic sequence
atctgatcttctgaagaaaatatatttctttttattcatagctcttaactagtggtgatagcaatgtcagcagtgccttcatccatagaaaactcctcgggtgaagccacagatgccgaggagttctctatggatgcaagtaaggttgaccatactctactctagttatattctttaggcacgaatgtgtgtttaaaaaaaataaaaactagtggtgatagcaatgtcagcagtgccttgaatcatcatgatagccgcttgtgaagccacagatgaagcggctataatgatgattccaagtaaggttgaccatactctactctagagttgtgttttaatgtatattaatgttactaatgtgtttactagtggtgatagcaatgtcagcagtgccttcttgtgtgttcattatcctaggtgaagccacagatgctaggataataaacacacaagcaagtaaggttgaccatactctactctaggttatttttagtatgattctgtaaaaatgaattaatactaactagtggtgatagcaatgtcagcagtgccttatttcttcacaatgagcactcgtgaagccacagatggagtgctcatcgtgaagaaatcatttttcagatgtatcatctcttaaaatactgtaattgcaactagtggtgatagcaatgtcagcagtgccttgttttcagtgtatccatgagggtgaagccacagatgcctcatggatccactgaaaaccaagtaaggttgaccatactctactctagaagtaaggttgaccatactctactctagtcagttttattgatagtcttttcagtattattgataatctt

SEQ ID NO: 208 - DNA, 521 bp, Artificial sequence
  Synthetic sequence
atctgatcttctgaagaaaatatatttctttttattcatagctcttaactagtggtgatagcaatgtcagcagtgcctttttacttggtgtttatgcagggtgaagccacagatgcctgcataaaaaccaagtaaacaagtaaggttgaccatactctactctagagttgtgttttaatgtatattaatgttactaatgtgtttactagtggtgatagcaatgtcagcagtgccttacaacatctactagatggcttgtgaagccacagatgaagccatctaatagatgttgtcaagtaaggttgaccatactctactctaggttatttttagtatgattctgtaaaaatgaattaatactaactagtggtgatagcaatgtcagcagtgccttttatgtcagagtctgactggtgtgaagccacagatgaccagtcagaatctgacataacaagtaaggttgaccatactctactctagtcagttttattgatagtcttttcagtattattgataatctt

SEQ ID NO: 209 - DNA, 521 bp, Artificial sequence
  Synthetic sequence
atctgatcttctgaagaaaatatatttctttttattcatagctcttaactagtggtgatagcaatgtcagcagtgcctttgagttacaatgagacagctggtgaagccacagatgcagctgtctccttgtaactcacaagtaaggttgaccatactctactctagagttgtgttttaatgtatattaatgttactaatgtgtttactagtggtgatagcaatgtcagcagtgccttattctgaccaataaaagcaaggtgaagccacagatgcttgcttttactggtcagaatcaagtaaggttgaccatactctactctaggttatttttagtatgattctgtaaaaatgaattaatactaactagtggtgatagcaatgtcagcagtgcctttttacctgaagaactagcagcgtgaagccacagatggctgctagttattcaggtaaacaagtaaggttgaccatactctactctagtcagttttattgatagtcttttcagtattattgataatctt

SEQ ID NO: 210 - DNA, 521 bp, Artificial sequence
  Synthetic sequence
atctgatcttctgaagaaaatatatttctttttattcatagctcttaactagtggtgatagcaatgtcagcagtgccttaactcatagatctaaagccaagtgaagccacagatgttggctttagctctatgagttcaagtaaggttgaccatactctactctagagttgtgttttaatgtatattaatgttactaatgtgtttactagtggtgatagcaatgtcagcagtgccttagagtacaacagttgcccagggtgaagccacagatgcctgggcaaccgttgtactctcaagtaaggttgaccatactctactctaggttatttttagtatgattctgtaaaaatgaattaatactaactagtggtgatagcaatgtcagcagtgcctttgtttagaattatacaggggcgtgaagccacagatggcccctgtatcattctaaacacaagtaaggttgaccatactctactctagtcagttttattgatagtcttttcagtattattgataatctt

SEQ ID NO: 211 - DNA, 442 bp, Artificial sequence; identical to SEQ ID NO: 193
  Synthetic sequence

SEQ ID NO: 212 - DNA, 363 bp, Artificial sequence
  Synthetic sequence
atctgatcttctgaagaaaatatatttctttttattcatagctcttaactagtggtgatagcaatgtcagcagtgcctttagtttttggattttctgtaggtgaagccacagatgctacagaaaacccaaaaactacaagtaaggttgaccatactctactctagagttgtgttttaatgtatattaatgttactaatgtgtttactagtggtgatagcaatgtcagcagtgcctttactcaagagcagaatccagggtgaagccacagatgcctggattctactcttgagtacaagtaaggttgaccatactctactctagtcagttttattgatagtcttttcagtattattgataatctt

SEQ ID NO: 213 - DNA, 363 bp, Artificial sequence
  Synthetic sequence
atctgatcttctgaagaaaatatatttctttttattcatagctcttaactagtggtgatagcaatgtcagcagtgccttttctgaaaacagtcaccgtaagtgaagccacagatgttacggtgaccgttttcagaacaagtaaggttgaccatactctactctagagttgtgttttaatgtatattaatgttactaatgtgtttactagtggtgatagcaatgtcagcagtgcctttaattctccgcttcttgctaggtgaagccacagatgctagcaagaaacggagaattacaagtaaggttgaccatactctactctagtcagttttattgatagtcttttcagtattattgataatctt

SEQ ID NO: 214 - DNA, 521 bp, Artificial sequence
  Synthetic sequence
atctgatcttctgaagaaaatatatttctttttattcatagctcttaactagtggtgatagcaatgtcagcagtgcctttagtttttggattttctgtaggtgaagccacagatgctacagaaaacccaaaaactacaagtaaggttgaccatactctactctagagttgtgttttaatgtatattaatgttactaatgtgtttactagtggtgatagcaatgtcagcagtgccttttctgaaaacagtcaccgtaagtgaagccacagatgttacggtgaccgttttcagaacaagtaaggttgaccatactctactctaggttatttttagtatgattctgtaaaaatgaattaatactaactagtggtgatagcaatgtcagcagtgcctttcaggatagagaacatgcagagtgaagccacagatgtctgcatgttatctatcctgacaagtaaggttgaccatactctactctagtcagttttattgatagtcttttcagtattattgataatctt

SEQ ID NO: 215 - DNA, 521 bp, Artificial sequence
  Synthetic sequence
atctgatcttctgaagaaaatatatttctttttattcatagctcttaactagtggtgatagcaatgtcagcagtgcctttactcaagagcagaatccagggtgaagccacagatgcctggattctactcttgagtacaagtaaggttgaccatactctactctagagttgtgttttaatgtatattaatgttactaatgtgtttactagtggtgatagcaatgtcagcagtgcctttaattctccgcttcttgctaggtgaagccacagatgctagcaagaaacggagaattacaagtaaggttgaccatactctactctaggttatttttagtatgattctgtaaaaatgaattaatactaactagtggtgatagcaatgtcagcagtgcctttagtttttggattttctgtaggtgaagccacagatgctacagaaaacccaaaaactacaagtaaggttgaccatactctactctagtcagttttattgatagtcttttcagtattattgataatctt

SEQ ID NO: 216 - DNA, 521 bp, Artificial sequence
  Synthetic sequence
atctgatcttctgaagaaaatatatttctttttattcatagctcttaactagtggtgatagcaatgtcagcagtgcctttagtttttggattttctgtaggtgaagccacagatgctacagaaaacccaaaaactacaagtaaggttgaccatactctactctagagttgtgttttaatgtatattaatgttactaatgtgtttactagtggtgatagcaatgtcagcagtgcctttactcaagagcagaatccagggtgaagccacagatgcctggattctactcttgagtacaagtaaggttgaccatactctactctaggttatttttagtatgattctgtaaaaatgaattaatactaactagtggtgatagcaatgtcagcagtgccttttctgaaaacagtcaccgtaagtgaagccacagatgttacggtgaccgttttcagaacaagtaaggttgaccatactctactctagtcagttttattgatagtcttttcagtattattgataatctt

SEQ ID NO: 217 - DNA, 363 bp, Artificial sequence
  Synthetic sequence
atctgatcttctgaagaaaatatatttctttttattcatagctcttaactagtggtgatagcaatgtcagcagtgccttaatttattaagactcatccaagtgaagccacagatgttggatgagtattaataaattcaagtaaggttgaccatactctactctagagttgtgttttaatgtatattaatgttactaatgtgtttactagtggtgatagcaatgtcagcagtgccttacaagtttactcactacctgggtgaagccacagatgccaggtagtgcgtaaacttgtcaagtaaggttgaccatactctactctagtcagttttattgatagtcttttcagtattattgataatctt

SEQ ID NO: 218 - DNA, 363 bp, Artificial sequence
  Synthetic sequence
atctgatcttctgaagaaaatatatttctttttattcatagctcttaactagtggtgatagcaatgtcagcagtgcctatgaagtctatgaagagtcagggtgaagccacagatgcctgactcttaatagacttcacaagtaaggttgaccatactctactctagagttgtgttttaatgtatattaatgttactaatgtgtttactagtggtgatagcaatgtcagcagtgccttatttgactcatacagacacccgtgaagccacagatggggtgtctgtctgagtcaaatcaagtaaggttgaccatactctactctagtcagttttattgatagtcttttcagtattattgataatctt

SEQ ID NO: 219 - DNA, 521 bp, Artificial sequence
  Synthetic sequence
atctgatcttctgaagaaaatatatttctttttattcatagctcttaactagtggtgatagcaatgtcagcagtgccttaattcgttagaacattccttggtgaagccacagatgcaaggaatgtcctaacgaattcaagtaaggttgaccatactctactctagagttgtgttttaatgtatattaatgttactaatgtgtttactagtggtgatagcaatgtcagcagtgccttacaagtttactcactacctgggtgaagccacagatgccaggtagtgcgtaaacttgtcaagtaaggttgaccatactctactctaggttatttttagtatgattctgtaaaaatgaattaatactaactagtggtgatagcaatgtcagcagtgccttaatttattaagactcatccaagtgaagccacagatgttggatgagtattaataaattcaagtaaggttgaccatactctactctagtcagttttattgatagtcttttcagtattattgataatctt

SEQ ID NO: 220 - DNA, 521 bp, Artificial sequence
  Synthetic sequence
atctgatcttctgaagaaaatatatttctttttattcatagctcttaactagtggtgatagcaatgtcagcagtgcctatgaagtctatgaagagtcagggtgaagccacagatgcctgactcttaatagacttcacaagtaaggttgaccatactctactctagagttgtgttttaatgtatattaatgttactaatgtgtttactagtggtgatagcaatgtcagcagtgccttatttgactcatacagacacccgtgaagccacagatggggtgtctgtctgagtcaaatcaagtaaggttgaccatactctactctaggttatttttagtatgattctgtaaaaatgaattaatactaactagtggtgatagcaatgtcagcagtgccttaatttattaagactcatccaagtgaagccacagatgttggatgagtattaataaattcaagtaaggttgaccatactctactctagtcagttttattgatagtcttttcagtattattgataatctt

SEQ ID NO: 221 - DNA, 521 bp, Artificial sequence
  Synthetic sequence
atctgatcttctgaagaaaatatatttctttttattcatagctcttaactagtggtgatagcaatgtcagcagtgccttatttgactcatacagacacccgtgaagccacagatggggtgtctgtctgagtcaaatcaagtaaggttgaccatactctactctagagttgtgttttaatgtatattaatgttactaatgtgtttactagtggtgatagcaatgtcagcagtgccttacaagtttactcactacctgggtgaagccacagatgccaggtagtgcgtaaacttgtcaagtaaggttgaccatactctactctaggttatttttagtatgattctgtaaaaatgaattaatactaactagtggtgatagcaatgtcagcagtgccttaatttattaagactcatccaagtgaagccacagatgttggatgagtattaataaattcaagtaaggttgaccatactctactctagtcagttttattgatagtcttttcagtattattgataatctt

SEQ ID NO: 222 - DNA, 681 bp, Artificial sequence
  Synthetic sequence
atctgatcttctgaagaaaatatatttctttttattcatagctcttaactagtggtgatagcaatgtcagcagtgcctttagtttttggattttctgtaggtgaagccacagatgctacagaaaacccaaaaactacaagtaaggttgaccatactctactctagttatattctttaggcacgaatgtgtgtttaaaaaaaataaaaactagtggtgatagcaatgtcagcagtgccttaatttattaagactcatccaagtgaagccacagatgttggatgagtattaataaattcaagtaaggttgaccatactctactctagagttgtgttttaatgtatattaatgttactaatgtgtttactagtggtgatagcaatgtcagcagtgccttttctgaaaacagtcaccgtaagtgaagccacagatgttacggtgaccgttttcagaacaagtaaggttgaccatactctactctaggttatttttagtatgattctgtaaaaatgaattaatactaactagtggtgatagcaatgtcagcagtgccttacaagtttactcactacctgggtgaagccacagatgccaggtagtgcgtaaacttgtcaagtaaggttgaccatactctactctagtcagttttattgatagtcttttcagtattattgataatctt

SEQ ID NO: 223 - DNA, 681 bp, Artificial sequence
  Synthetic sequence
atctgatcttctgaagaaaatatatttctttttattcatagctcttaactagtggtgatagcaatgtcagcagtgcctttactcaagagcagaatccagggtgaagccacagatgcctggattctactcttgagtacaagtaaggttgaccatactctactctagttatattctttaggcacgaatgtgtgtttaaaaaaaataaaaactagtggtgatagcaatgtcagcagtgccttaattcgttagaacattccttggtgaagccacagatgcaaggaatgtcctaacgaattcaagtaaggttgaccatactctactctagagttgtgttttaatgtatattaatgttactaatgtgtttactagtggtgatagcaatgtcagcagtgcctttaattctccgcttcttgctaggtgaagccacagatgctagcaagaaacggagaattacaagtaaggttgaccatactctactctaggttatttttagtatgattctgtaaaaatgaattaatactaactagtggtgatagcaatgtcagcagtgccttatttgactcatacagacacccgtgaagccacagatggggtgtctgtctgagtcaaatcaagtaaggttgaccatactctactctagtcagttttattgatagtcttttcagtattattgataatctt

SEQ ID NO: 224 - DNA, 839 bp, Artificial sequence
  Synthetic sequence
atctgatcttctgaagaaaatatatttctttttattcatagctcttaactagtggtgatagcaatgtcagcagtgccttttctgaaaacagtcaccgtaagtgaagccacagatgttacggtgaccgttttcagaacaagtaaggttgaccatactctactctagttatattctttaggcacgaatgtgtgtttaaaaaaaataaaaactagtggtgatagcaatgtcagcagtgccttacaagtttactcactacctgggtgaagccacagatgccaggtagtgcgtaaacttgtcaagtaaggttgaccatactctactctagagttgtgttttaatgtatattaatgttactaatgtgtttactagtggtgatagcaatgtcagcagtgcctttagtttttggattttctgtaggtgaagccacagatgctacagaaaacccaaaaactacaagtaaggttgaccatactctactctaggttatttttagtatgattctgtaaaaatgaattaatactaactagtggtgatagcaatgtcagcagtgccttaatttattaagactcatccaagtgaagccacagatgttggatgagtattaataaattcaagtaaggttgaccatactctactctagatttttcagatgtatcatctcttaaaatactgtaattgcaactagtggtgatagcaatgtcagcagtgcctttactcaagagcagaatccagggtgaagccacagatgcctggattctactcttgagtacaagtaaggttgaccatactctactctagtcagttttattgatagtcttttcagtattattgataatctt

SEQ ID NO: 225 - DNA, 839 bp, Artificial sequence
  Synthetic sequence
atctgatcttctgaagaaaatatatttctttttattcatagctcttaactagtggtgatagcaatgtcagcagtgcctttcaggatagagaacatgcagagtgaagccacagatgtctgcatgttatctatcctgacaagtaaggttgaccatactctactctagttatattctttaggcacgaatgtgtgtttaaaaaaaataaaaactagtggtgatagcaatgtcagcagtgcctatgaagtctatgaagagtcagggtgaagccacagatgcctgactcttaatagacttcacaagtaaggttgaccatactctactctagagttgtgttttaatgtatattaatgttactaatgtgtttactagtggtgatagcaatgtcagcagtgcctttaattctccgcttcttgctaggtgaagccacagatgctagcaagaaacggagaattacaagtaaggttgaccatactctactctaggttatttttagtatgattctgtaaaaatgaattaatactaactagtggtgatagcaatgtcagcagtgccttaattcgttagaacattccttggtgaagccacagatgcaaggaatgtcctaacgaattcaagtaaggttgaccatactctactctagatttttcagatgtatcatctcttaaaatactgtaattgcaactagtggtgatagcaatgtcagcagtgcctttcaggatagagaacatgcagagtgaagccacagatgtctgcatgttatctatcctgacaagtaaggttgaccatactctactctagtcagttttattgatagtcttttcagtattattgataatctt

SEQ ID NO: 226 - DNA, 363 bp, Artificial sequence
  Synthetic sequence
atctgatcttctgaagaaaatatatttctttttattcatagctcttaactagtggtgatagcaatgtcagcagtgccttaaaataacacacaagagccatgtgaagccacagatgatggctcttgagtgttattttcaagtaaggttgaccatactctactctagagttgtgttttaatgtatattaatgttactaatgtgtttactagtggtgatagcaatgtcagcagtgcctttaaacagtaagtagtctctgggtgaagccacagatgccagagactaattactgtttacaagtaaggttgaccatactctactctagtcagttttattgatagtcttttcagtattattgataatctt

SEQ ID NO: 227 - DNA, 363 bp, Artificial sequence
  Synthetic sequence
atctgatcttctgaagaaaatatatttctttttattcatagctcttaactagtggtgatagcaatgtcagcagtgcctttcattttgacatacatacttggtgaagccacagatgcaagtatgtacgtcaaaatgacaagtaaggttgaccatactctactctagagttgtgttttaatgtatattaatgttactaatgtgtttactagtggtgatagcaatgtcagcagtgcctttccacgtctgtcttgtcctacgtgaagccacagatggtaggacaagccagacgtggacaagtaaggttgaccatactctactctagtcagttttattgatagtcttttcagtattattgataatctt

SEQ ID NO: 228 - DNA, 521 bp, Artificial sequence
  Synthetic sequence
atctgatcttctgaagaaaatatatttctttttattcatagctcttaactagtggtgatagcaatgtcagcagtgcctttcattttgacatacatacttggtgaagccacagatgcaagtatgtacgtcaaaatgacaagtaaggttgaccatactctactctagagttgtgttttaatgtatattaatgttactaatgtgtttactagtggtgatagcaatgtcagcagtgcctttaaacagtaagtagtctctgggtgaagccacagatgccagagactaattactgtttacaagtaaggttgaccatactctactctaggttatttttagtatgattctgtaaaaatgaattaatactaactagtggtgatagcaatgtcagcagtgccttaaaataacacacaagagccatgtgaagccacagatgatggctcttgagtgttattttcaagtaaggttgaccatactctactctagtcagttttattgatagtcttttcagtattattgataatctt

SEQ ID NO: 229 - DNA, 521 bp, Artificial sequence
  Synthetic sequence
atctgatcttctgaagaaaatatatttctttttattcatagctcttaactagtggtgatagcaatgtcagcagtgcctttgggtgttaataaaaaggcaggtgaagccacagatgctgcctttttcttaacacccacaagtaaggttgaccatactctactctagagttgtgttttaatgtatattaatgttactaatgtgtttactagtggtgatagcaatgtcagcagtgcctttaaacagtaagtagtctctgggtgaagccacagatgccagagactaattactgtttacaagtaaggttgaccatactctactctaggttatttttagtatgattctgtaaaaatgaattaatactaactagtggtgatagcaatgtcagcagtgccttaaaataacacacaagagccatgtgaagccacagatgatggctcttgagtgttattttcaagtaaggttgaccatactctactctagtcagttttattgatagtcttttcagtattattgataatctt

SEQ ID NO: 230 - DNA, 681 bp, Artificial sequence
  Synthetic sequence
atctgatcttctgaagaaaatatatttctttttattcatagctcttaactagtggtgatagcaatgtcagcagtgccttaaaataacacacaagagccatgtgaagccacagatgatggctcttgcgtgttattttcaagtaaggttgaccatactctactctagttatattctttaggcacgaatgtgtgtttaaaaaaaataaaaactagtggtgatagcaatgtcagcagtgcctttaaacagtaagtagtctctgggtgaagccacagatgccagagactaattactgtttacaagtaaggttgaccatactctactctagagttgtgttttaatgtatattaatgttactaatgtgtttactagtggtgatagcaatgtcagcagtgcctttgggtgttaataaaaaggcaggtgaagccacagatgctgcctttttcttaacacccacaagtaaggttgaccatactctactctaggttatttttagtatgattctgtaaaaatgaattaatactaactagtggtgatagcaatgtcagcagtgcctttcattttgacatacatacttggtgaagccacagatgcaagtatgtacgtcaaaatgacaagtaaggttgaccatactctactctagtcagttttattgatagtcttttcagtattattgataatctt

SEQ ID NO: 231 - DNA, 363 bp, Artificial sequence
  Synthetic sequence
atctgatcttctgaagaaaatatatttctttttattcatagctcttaactagtggtgatagcaatgtcagcagtgccttaacacagtaccgccttagtgcgtgaagccacagatggcactaaggcagtactgtgttcaagtaaggttgaccatactctactctagagttgtgttttaatgtatattaatgttactaatgtgtttactagtggtgatagcaatgtcagcagtgccttaaacaacaatggatccccaaagtgaagccacagatgtttggggatcaattgttgtttcaagtaaggttgaccatactctactctagtcagttttattgatagtcttttcagtattattgataatctt

SEQ ID NO: 232 - DNA, 363 bp, Artificial sequence
  Synthetic sequence
atctgatcttctgaagaaaatatatttctttttattcatagctcttaactagtggtgatagcaatgtcagcagtgcctttgaagataactttgtccccgggtgaagccacagatgccggggacaacgttatcttcacaagtaaggttgaccatactctactctagagttgtgttttaatgtatattaatgttactaatgtgtttactagtggtgatagcaatgtcagcagtgcctaagactatcagcaagaaccagggtgaagccacagatgcctggttcttactgatagtctcaagtaaggttgaccatactctactctagtcagttttattgatagtcttttcagtattattgataatctt

SEQ ID NO: 233 - DNA, 521 bp, Artificial sequence
  Synthetic sequence
atctgatcttctgaagaaaatatatttctttttattcatagctcttaactagtggtgatagcaatgtcagcagtgcctttgctcatgattgtgaaccaaagtgaagccacagatgtttggttcaccatcatgagcacaagtaaggttgaccatactctactctagagttgtgttttaatgtatattaatgttactaatgtgtttactagtggtgatagcaatgtcagcagtgccttaaacaacaatggatccccaaagtgaagccacagatgtttggggatcaattgttgtttcaagtaaggttgaccatactctactctaggttatttttagtatgattctgtaaaaatgaattaatactaactagtggtgatagcaatgtcagcagtgcctttgaagataactttgtccccgggtgaagccacagatgccggggacaacgttatcttcacaagtaaggttgaccatactctactctagtcagttttattgatagtcttttcagtattattgataatctt

SEQ ID NO: 234 - DNA, 521 bp, Artificial sequence
  Synthetic sequence
atctgatcttctgaagaaaatatatttctttttattcatagctcttaactagtggtgatagcaatgtcagcagtgccttaaacaacaatggatccccaaagtgaagccacagatgtttggggatcaattgttgtttcaagtaaggttgaccatactctactctagagttgtgttttaatgtatattaatgttactaatgtgtttactagtggtgatagcaatgtcagcagtgccttaacacagtaccgccttagtgcgtgaagccacagatggcactaaggcagtactgtgttcaagtaaggttgaccatactctactctaggttatttttagtatgattctgtaaaaatgaattaatactaactagtggtgatagcaatgtcagcagtgcctttgctcatgattgtgaaccaaagtgaagccacagatgtttggttcaccatcatgagcacaagtaaggttgaccatactctactctagtcagttttattgatagtcttttcagtattattgataatctt

SEQ ID NO: 235 - DNA, 681 bp, Artificial sequence
  Synthetic sequence
atctgatcttctgaagaaaatatatttctttttattcatagctcttaactagtggtgatagcaatgtcagcagtgcctaagactatcagcaagaaccagggtgaagccacagatgcctggttcttactgatagtctcaagtaaggttgaccatactctactctagttatattctttaggcacgaatgtgtgtttaaaaaaaataaaaactagtggtgatagcaatgtcagcagtgcctttgaagataactttgtccccgggtgaagccacagatgccggggacaacgttatcttcacaagtaaggttgaccatactctactctagagttgtgttttaatgtatattaatgttactaatgtgtttactagtggtgatagcaatgtcagcagtgccttaaacaacaatggatccccaaagtgaagccacagatgtttggggatcaattgttgtttcaagtaaggttgaccatactctactctaggttatttttagtatgattctgtaaaaatgaattaatactaactagtggtgatagcaatgtcagcagtgcctttgctcatgattgtgaaccaaagtgaagccacagatgtttggttcaccatcatgagcacaagtaaggttgaccatactctactctagtcagttttattgatagtcttttcagtattattgataatctt

SEQ ID NO: 236 - DNA, 681 bp, Artificial sequence
  Synthetic sequence
atctgatcttctgaagaaaatatatttctttttattcatagctcttaactagtggtgatagcaatgtcagcagtgccttaaacaacaatggatccccaaagtgaagccacagatgtttggggatcaattgttgtttcaagtaaggttgaccatactctactctagttatattctttaggcacgaatgtgtgtttaaaaaaaataaaaactagtggtgatagcaatgtcagcagtgccttaaaataacacacaagagccatgtgaagccacagatgatggctcttgagtgttattttcaagtaaggttgaccatactctactctagagttgtgttttaatgtatattaatgttactaatgtgtttactagtggtgatagcaatgtcagcagtgcctttgaagataactttgtccccgggtgaagccacagatgccggggacaacgttatcttcacaagtaaggttgaccatactctactctaggttatttttagtatgattctgtaaaaatgaattaatactaactagtggtgatagcaatgtcagcagtgcctttccacgtctgtcttgtcctacgtgaagccacagatggtaggacaagccagacgtggacaagtaaggttgaccatactctactctagtcagttttattgatagtcttttcagtattattgataatctt

SEQ ID NO: 237 - DNA, 681 bp, Artificial sequence
  Synthetic sequence
atctgatcttctgaagaaaatatatttctttttattcatagctcttaactagtggtgatagcaatgtcagcagtgcctttgggtgttaataaaaaggcaggtgaagccacagatgctgcctttttcttaacacccacaagtaaggttgaccatactctactctagttatattctttaggcacgaatgtgtgtttaaaaaaaataaaaactagtggtgatagcaatgtcagcagtgcctttgaagataactttgtccccgggtgaagccacagatgccggggacaacgttatcttcacaagtaaggttgaccatactctactctagagttgtgttttaatgtatattaatgttactaatgtgtttactagtggtgatagcaatgtcagcagtgccttagtgtagacaacagtacctctgtgaagccacagatgagaggtactgctgtctacactcaagtaaggttgaccatactctactctaggttatttttagtatgattctgtaaaaatgaattaatactaactagtggtgatagcaatgtcagcagtgcctttgctcatgattgtgaaccaaagtgaagccacagatgtttggttcaccatcatgagcacaagtaaggttgaccatactctactctagtcagttttattgatagtcttttcagtattattgataatctt

SEQ ID NO: 238 - DNA, 681 bp, Artificial sequence
  Synthetic sequence
atctgatcttctgaagaaaatatatttctttttattcatagctcttaactagtggtgatagcaatgtcagcagtgccttaacacagtaccgccttagtgcgtgaagccacagatggcactaaggcagtactgtgttcaagtaaggttgaccatactctactctagttatattctttaggcacgaatgtgtgtttaaaaaaaataaaaactagtggtgatagcaatgtcagcagtgcctttaaacagtaagtagtctctgggtgaagccacagatgccagagactaattactgtttacaagtaaggttgaccatactctactctagagttgtgttttaatgtatattaatgttactaatgtgtttactagtggtgatagcaatgtcagcagtgcctttgaagataactttgtccccgggtgaagccacagatgccggggacaacgttatcttcacaagtaaggttgaccatactctactctaggttatttttagtatgattctgtaaaaatgaattaatactaactagtggtgatagcaatgtcagcagtgcctttccacgtctgtcttgtcctacgtgaagccacagatggtaggacaagccagacgtggacaagtaaggttgaccatactctactctagtcagttttattgatagtcttttcagtattattgataatctt

SEQ ID NO: 239 - DNA, 681 bp, Artificial sequence
  Synthetic sequence
atctgatcttctgaagaaaatatatttctttttattcatagctcttaactagtggtgatagcaatgtcagcagtgccttagtgtagacaacagtacctctgtgaagccacagatgagaggtactattgtctacactcaagtaaggttgaccatactctactctagttatattctttaggcacgaatgtgtgtttaaaaaaaataaaaactagtggtgatagcaatgtcagcagtgcctttccacgtctgtcttgtcctacgtgaagccacagatggtaggacaagccagacgtggacaagtaaggttgaccatactctactctagagttgtgttttaatgtatattaatgttactaatgtgtttactagtggtgatagcaatgtcagcagtgccttaaacaacaatggatccccaaagtgaagccacagatgtttggggatcaattgttgtttcaagtaaggttgaccatactctactctaggttatttttagtatgattctgtaaaaatgaattaatactaactagtggtgatagcaatgtcagcagtgccttaacacagtaccgccttagtgcgtgaagccacagatggcactaaggcagtactgtgttcaagtaaggttgaccatactctactctagtcagttttattgatagtcttttcagtattattgataatctt

SEQ ID NO: 240 - DNA, 839 bp, Artificial sequence
  Synthetic sequence
atctgatcttctgaagaaaatatatttctttttattcatagctcttaactagtggtgatagcaatgtcagcagtgcctaagactatcagcaagaaccagggtgaagccacagatgcctggttcttactgatagtctcaagtaaggttgaccatactctactctagttatattctttaggcacgaatgtgtgtttaaaaaaaataaaaactagtggtgatagcaatgtcagcagtgccttaaaataacacacaagagccatgtgaagccacagatgatggctcttgcgtgttattttcaagtaaggttgaccatactctactctagagttgtgttttaatgtatattaatgttactaatgtgtttactagtggtgatagcaatgtcagcagtgcctttgaagataactttgtccccgggtgaagccacagatgccggggacaacgttatcttcacaagtaaggttgaccatactctactctaggttatttttagtatgattctgtaaaaatgaattaatactaactagtggtgatagcaatgtcagcagtgcctttaaacagtaagtagtctctgggtgaagccacagatgccagagactaattactgtttacaagtaaggttgaccatactctactctagatttttcagatgtatcatctcttaaaatactgtaattgcaactagtggtgatagcaatgtcagcagtgccttaaacaacaatggatccccaaagtgaagccacagatgtttggggatcaattgttgtttcaagtaaggttgaccatactctactctagtcagttttattgatagtcttttcagtattattgataatctt

SEQ ID NO: 241 - DNA, 15 bp, Artificial sequence
  Synthetic sequence
gtgaagccacagatg

SEQ ID NO: 242 - DNA, 15 bp, Artificial sequence
  Synthetic sequence
tttggccactgactg

SEQ ID NO: 243 - DNA, 19 bp, Artificial sequence
  Synthetic sequence
gttttggccactgactgac

SEQ ID NO: 244 - DNA, 13 bp, Artificial sequence
  Synthetic sequence
ctgggctcagacc

SEQ ID NO: 245 - DNA, 16 bp, Artificial sequence
  Synthetic sequence
ctgttgaatctcatgg

SEQ ID NO: 246 - DNA, 19 bp, Artificial sequence
  Synthetic sequence
ctgtgaagccacagatggg

SEQ ID NO: 247 - DNA, 13 bp, Artificial sequence
  Synthetic sequence
tgtttagttatct

SEQ ID NO: 248 - DNA, 20 bp, Artificial sequence
  Synthetic sequence
ttaagattctaaaattatct

SEQ ID NO: 249 - DNA, 14 bp, Artificial sequence
  Synthetic sequence
tgtctaaactatca

SEQ ID NO: 250 - DNA, 13 bp, Artificial sequence
  Synthetic sequence
tggtcccctcccc

SEQ ID NO: 251 - DNA, 47 bp, Artificial sequence
  Synthetic sequence
atctgatcttctgaagaaaatatatttctttttattcatagctctta

SEQ ID NO: 252 - DNA, 133 bp, Artificial sequence
  Synthetic sequence
aattcacagactttcctcatgaaaccagctcatctgagaaaacagcaaagtttaaaaaagaaatactatcagtgctgcaaaccaggaaggggaagtgtgtggtttaagttgcatatcccttatcctctggctg

SEQ ID NO: 253 - DNA, 41 bp, Artificial sequence
  Synthetic sequence
tcagttttattgatagtcttttcagtattattgataatctt

SEQ ID NO: 254 - DNA, 95 bp, Artificial sequence
  Synthetic sequence
accgtgggaggatgacaagtccaagagtcaccctgctggatgaacgtagatgtcagactctatcatttaatgtgctagtcataacctggttacta

SEQ ID NO: 255 - DNA, 25 bp, Artificial sequence
  Synthetic sequence
ggtgatagcaatgtcagcagtgcct

SEQ ID NO: 256 - DNA, 23 bp, Artificial sequence
  Synthetic sequence
aagtaaggttgaccatactctac

SEQ ID NO: 257 - DNA, 28 bp, Artificial sequence
  Synthetic sequence
ctggaggcttgctgaaggctgtatgctg

SEQ ID NO: 258 - DNA, 30 bp, Artificial sequence
  Synthetic sequence
caggacacaaggcctgttactagcactcac

SEQ ID NO: 259 - DNA, 15 bp, Artificial sequence
  Synthetic sequence
ctccccatggccctg

SEQ ID NO: 260 - DNA, 12 bp, Artificial sequence
  Synthetic sequence
ggacctggggac

SEQ ID NO: 261 - DNA, 19 bp, Artificial sequence
  Synthetic sequence
gctgtaccaccttgtcggg

SEQ ID NO: 262 - DNA, 20 bp, Artificial sequence
  Synthetic sequence
ctgacattttggtatctttc

SEQ ID NO: 263 - DNA, 20 bp, Artificial sequence
  Synthetic sequence
tgctgttgacagtgagcgac

SEQ ID NO: 264 - DNA, 15 bp, Artificial sequence
  Synthetic sequence
tgcctactgcctcgg

SEQ ID NO: 265 - DNA, 13 bp, Artificial sequence
  Synthetic sequence
gtcagcagtgcct

SEQ ID NO: 266 - DNA, 11 bp, Artificial sequence
  Synthetic sequence
gtaaggttgac

SEQ ID NO: 267 - DNA, 14 bp, Artificial sequence
  Synthetic sequence
ccttagcagagctg

SEQ ID NO: 268 - DNA, 13 bp, Artificial sequence
  Synthetic sequence
gctactgctaggc

SEQ ID NO: 269 - DNA, 14 bp, Artificial sequence
  Synthetic sequence
agggggcgagggat

SEQ ID NO: 270 - DNA, 11 bp, Artificial sequence
  Synthetic sequence
cttccctccca

SEQ ID NO: 271 - DNA, 21 bp, Artificial sequence
  Synthetic sequence
atggaacaaatggcccagatc

SEQ ID NO: 272 - DNA, 42 bp, Artificial sequence
  Synthetic sequence
ttatattctttaggcacgaatgtgtgtttaaaaaaaataaaa

SEQ ID NO: 273 - DNA, 39 bp, Artificial sequence
  Synthetic sequence
agttgtgttttaatgtatattaatgttactaatgtgttt

SEQ ID NO: 274 - DNA, 40 bp, Artificial sequence
  Synthetic sequence
gttatttttagtatgattctgtaaaaatgaattaatacta

SEQ ID NO: 275 - DNA, 40 bp, Artificial sequence
  Synthetic sequence
atttttcagatgtatcatctcttaaaatactgtaattgca

SEQ ID NO: 276 - DNA, 38 bp, Artificial sequence
  Synthetic sequence
aagcttatgcagcattagaggaatttattttaatgcac

SEQ ID NO: 277 - DNA, 40 bp, Artificial sequence
  Synthetic sequence
atttatattcaacatagacattaattcagatttttacttg

SEQ ID NO: 278 - DNA, 40 bp, Artificial sequence
  Synthetic sequence
ggataaaacaaattctagttttccctttgttttgaaatta

SEQ ID NO: 279 - DNA, 714 bp, Artificial sequence
  Synthetic sequence
atggtgtcaaaaggggaggaattgatcaaagagaacatgcatatgaaactgtacatggagggaactgtcaacaatcaccacttcaaatgcacctcagagggcgagggaaagccctacgaagggacccagaccatgcgcattaaggtggtcgaaggcggaccactcccttttgcattcgacatcctggctacctccttcatgtacggatcgcgcacttttatcaagtacccgaaggggatcccggacttcttcaagcaatccttccctgagggattcacttgggaacgggtcacgacctacgaagatggaggcgtggtgaccgtgatgcaagacactagcctggaagatggctgccttgtctacaacgtgaagatcagaggtgtgaacttcccatccaatggccccgtgatgcagaaaaagactctggggtgggaagccaataccgaaatgctctacccagcggacggaggactcgaaggccggtctgacatggccctgaagctggtcggaggaggacatttgtcgtgtagctttgtgactacgtaccggtcgaagaagccggccaaaaacctgaagatgccgggtatccacgcggtggaccatagactggaacgcctggaggagagcgataacgagatgttcgtcgttcagagggaacacgctgtggcacgatattgcgatctcccgtcgaagcttggtcacaagctcaattaa

SEQ ID NO: 280 - DNA, 708 bp, Artificial sequence
  Synthetic sequence
gtgtcaaaaggggaggaattgatcaaagagaaccctcatcctaaactgtaccctgagggaactgtcaacaatcaccacttcaaatgcacctcagagggcgagggaaagccctacgaagggacccagacccctcgcattaaggtggtcgaaggcggaccactcccttttgcattcgacatcctggctacctccttcccttacggatcgcgcacttttatcaagtacccgaaggggatcccggacttcttcaagcaatccttccctgagggattcacttgggaacgggtcacgacctacgaagatggaggcgtggtgaccgtgcctcaagacactagcctggaagatggctgccttgtctacaacgtgaagatcagaggtgtgaacttcccatccaatggccccgtgcctcagaaaaagactctggggtgggaagccaataccgaacctctctacccagcggacggaggactcgaaggccggtctgaccctgccctgaagctggtcggaggaggacatttgtcgtgtagctttgtgactacgtaccggtcgaagaagccggccaaaaacctgaagatgccgggtatccacgcggtggaccatagactggaacgcctggaggagagcgataacgagatgttcgtcgttcagagggaacacgctgtggcacgatattgcgatctcccgtcgaagcttggtcacaagctcaat

SEQ ID NO: 281 - DNA, 392 bp, Artificial sequence
  Synthetic sequence
ctagcctaccgttgctccggtgatcctgcaccgcgccaattctaatctaggccgaggatcttcagcgtacgccggagtacacgcgcaaaggccggacatcagcttaacgcgccaattgcgcgtcgcctatgcatggggccgcctagccatgtaaacgtggtcctgtctaactggtccggccctagtggggtaattccttcgagccgggttcgagcaatttgatattctgtgtaaaactccgcctaaggtgctggttcgccaatttgtggagcgctttgaacgtccgtcgggcgagaagattgcgagctgtgcggctgagttgacgtatctgtgctggatgattactcataacggcaccgctatcaaacgtgccacgttcatgtcctacaatt

SEQ ID NO: 282 - DNA, 395 bp, Artificial sequence
  Synthetic sequence
cccccactgtcattagcaactccttgtccttcgatctcgtcaacaacagcttgcagttcaaatacaagacccagaaggcgactattctggaagcgagcttgaagaaattgattccggcctggcaattcaccatcatcccatacaatggccagaagcatcagtctgacatcaccgacattgtttcgtatagcgtgcaattagaattggatcgcttatccgggcgcgcggccgatggcgcaagctccatgacgcggctagacatgcacgaccagggctacaattaactcgaaacgaccggggcgcgctcggcctagagatccgtactgtactttgttgttcaattggcgcatagcggccgtttgggtcttacggtccccactagaggcccggcctag

SEQ ID NO: 283 - DNA, 378 bp, Artificial sequence
  Synthetic sequence
ctagccgttctacccggtgcttgcacgatccaattccgcgcctaatctagggatctccgaggtacgtcagcgtacaccggaaaacgcgcgacggccgagcttatcgcgccaaccgcgtaattgtatgcatggcgccggccgccatgtctagcgtgaaacgtcgtcctctgtaaggggccgtccgctagtattgtatcgagcctttcctccttgcagttgcaattcgagtctagcgaagaagcagataagggtaacagccatagcaagaaaatcttgaaggcactgctgagcgagggtgaaagcatttgggagatcactgaaaagatcctgattcgttcgagtatacgtcccgtcaaaaccctgtaccaatttcttttt

SEQ ID NO: 284 - DNA, 385 bp, Artificial sequence
  Synthetic sequence
ccccgtttctggcgacgttcatcaactgtggtcgtttctccgacattaagaacgttgaccctaagtcctttaagctggttcaaaacaagtatctgggcgtcatcattcaatctctgttaccgaaaccaaaacgagcgttagccgtcacatctatttctttagcgctcgtggccgcatcgacccagcgtgcagtatgaattggatcattatccgggcgcggcttagatggcgccggccccatgacgcgaagctacatgcaccaggctaggactacggcgaaaatctcgaaacgggcgcgaccggcctagagatcctcggtgtactttcgtacgttgttggcgcatacaattgtttgcggccttacggtcgggtcactagcccaggg

SEQ ID NO: 285 - protein, 450 aa, Artificial sequence
  Synthetic sequence
EVQLVESGGGLVQPGGSLRLSCAASGFNIKDTYIHWVRQAPGKGLEWVARIYPTNGYTRYADSVKGRFTISADTSKNTAYLQMNSLRAEDTAVYYCSRWGGDGFYAMDYWGQGTLVTVSSASTKGPSVFPLAPSSKSTSGGTAALGCLVKDYFPEPVTVSWNSGALTSGVHTFPAVLQSSGLYSLSSVVTVPSSSLGTQTYICNVNHKPSNTKVDKKVEPKSCDKTHTCPPCPAPELLGGPSVFLFPPKPKDTLMISRTPEVTCVVVDVSHEDPEVKFNWYVDGVEVHNAKTKPREEQYNSTYRVVSVLTVLHQDWLNGKEYKCKVSNKALPAPIEKTISKAKGQPREPQVYTLPPSRDELTKNQVSLTCLVKGFYPSDIAVEWESNGQPENNYKTTPPVLDSDGSFFLYSKLTVDKSRWQQGNVFSCSVMHEALHNHYTQKSLSLSPGK

SEQ ID NO: 286 - protein, 214 aa, Artificial sequence
  Synthetic sequence
DIQMTQSPSSLSASVGDRVTITCRASQDVNTAVAWYQQKPGKAPKLLIYSASFLYSGVPSRFSGSRSGTDFTLTISSLQPEDFATYYCQQHYTTPPTFGQGTKVEIKRTVAAPSVFIFPPSDEQLKSGTASVVCLLNNFYPREAKVQWKVDNALQSGNSQESVTEQDSKDSTYSLSSTLTLSKADYEKHKVYACEVTHQGLSSPVTKSFNRGEC

SEQ ID NO: 287 - protein, 451 aa, Artificial sequence
  Synthetic sequence
EVQLVESGGGLVQPGGSLRLSCAASGFNIKDTYIHWVRQAPGKGLEWVARIYPTNGYTRYADSVKGRFTISADTSKNTAYLQMNSLRAEDTAVYYCSRWGGDGFYAMDYWGQGTLVTVSSASTKGPSVFPLAPSSKSTSGGTAALGCLVKDYFPEPVTVSWNSGALTSGVHTFPAVLQSSGLYSLSSVVTVPSSSLGTQTYICNVNHKPSNTKVDKKVEPPKSCDKTHTCPPCPAPELLGGPSVFLFPPKPKDTLMISRTPEVTCVVVDVSHEDPEVKFNWYVDGVEVHNAKTKPREEQYNSTYRVVSVLTVLHQDWLNGKEYKCKVSNKALPAPIEKTISKAKGQPREPQVYTLPPSRDELTKNQVSLTCLVKGFYPSDIAVEWESNGQPENNYKTTPPVLDSDGSFFLYSKLTVDKSRWQQGNVFSCSVMHEALHNHYTQKSLSLSPGK

SEQ ID NO: 288 - protein, 450 aa, Artificial sequence
  Synthetic sequence
EVQLVESGGGLVQPGGSLRLSCAASGFNIKDTYIHWVRQAPGKGLEWVARIYPTNGYTRYADSVKGRFTISADTSKNTAYLQMNSLRAEDTAVYYCSRWGGDGFYAMDYWGQGTLVTVSSASTKGPSVFPLAPSSKSTSGGTAALGCLVKDYFPEPVTVSWNSGALTSGVHTFPAVLQSSGLYSLSSVVTVPSSSLGTQTYICNVNHKPSNTKVDKKVEPKSCDKTHTCPPCPAPELLGGPSVFLFPPKPKDTLMISRTPEVTCVVVDVSHEDPEVKFNWYVDGVEVHNAKTKPREEQYNSTYRVVSVLTVLHQDWLNGKEYKCKVSNKALPAPIEKTISKAKGQPREPQVYTLPPSREEMTKNQVSLTCLVKGFYPSDIAVEWESNGQPENNYKTTPPVLDSDGSFFLYSKLTVDKSRWQQGNVFSCSVMHEALHNHYTQKSLSLSPGK

SEQ ID NO: 289 - DNA, 9736 bp, Artificial sequence
  Synthetic sequence
atgaagtgggtaacatttattagcctgttgtttctgttttcatcggcttattccgatattcagatgacccaatccccctcctcattgagcgcgtccgtcggagacagagtgaccattacttgtcgcgcctcccaagacgtgaacaccgctgtggcttggtaccagcagaagccgggaaaggcccctaagctgctgatctactctgcctccttcctgtactcgggcgtgccgagccggttcagcgggagccggtcgggaaccgatttcactctgaccatctcgtcactgcaacccgaggactttgccacctactactgccagcagcactacaccactccaccgaccttcggacaaggcaccaaggtcgaaatcaagcgcaccgtggccgcccctagcgtgtttatcttccctccctcggatgagcagcttaagtcaggcaccgcatccgtggtctgcctgctcaacaacttctacccgagggaagccaaagtgcagtggaaagtggacaacgcgctccagtcgggaaactcccaggagtccgtgaccgaacaggactccaaggacagcacttattccctgtcctccactctgacgctgtcaaaggccgactacgagaagcacaaggtctacgcctgcgaagtgacccatcaggggctttcctcgcccgtgactaagagcttcaatcggggcgaatgctaaggttaatcgagtacgatagccggctaatcagccataccacatttgtagaggttttacttgctttaaaaaacctcccacacctccccctgaacctgaaacataaaatgaatgcaattgttgttgttaacttgtttattgcagcttataatggttacaaataaagcaatagcatcacaaatttcacaaataaagcatttttttcactgcattctagttgtggtttgtccaaactcatcaatgtatcttatcatgtctggaattcggacggtgactgcagtgaataataaaatgtgtgtttgtccgaaatacgcgttttgagatttctgtcgccgactaaattcatgtcgcgcgatagtggtgtttatcgccgatagagatggcgatattggaaaaatcgatatttgaaaatatggcatattgaaaatgtcgccgatgtgagtttctgtgtaactgatatcgccatttttccaaaagtgatttttgggcatacgcgatatctggcgatagcgcttatatcgtttacgggggatggcgatagacgactttggtgacttgggcgattctgtgtgtcgcaaatatcgcagtttcgatataggtgacagacgatatgaggctatatcgccgatagaggcgacatcaagctggcacatggccaatgcatatcgatctatacattgaatcaatattggccattagccatattattcattggttatatagcataaatcaatattggctattggccattgcatacgttgtatccatatcataatatgtacatttatattggctcatgtccaacattaccgccatgttgacattgattattgactagttattaatagtaatcaattacggggtcattagttcatagcccatatatggagttccgcgttacataacttacggtaaatggcccgcctggctgaccgcccaacgacccccgcccattgacgtcaataatgacgtatgttcccatagtaacgccaatagggactttccattgacgtcaatgggtggagtatttacggtaaactgcccacttggcagtacatcaagtgtatcatatgccaagtacgccccctattgacgtcaatgacggtaaatggcccgcctggcattatgcccagtacatgaccttatgggactttcctacttggcagtacatctacgtattagtcatcgctattaccatggtgatgcggttttggcagtacatcaatgggcgtggatagcggtttgactcacggggatttccaagtctccaccccattgacgtcaatgggagtttgttttggcaccaaaatcaacgggactttccaaaatgtcgtaacaactccgccccattgacgcaaatgggcggtaggcgtgtacggtgggaggtctatataagcagagctcgtttagtgaaccgtcagatcgcctggagaggccatccacgctgttttgacctccatagtggacaccgggaccgatccagcctccgcggccgggaacggtgcattggaacgcggattccccgtgccaagagtgacgtaagtaccgcctatagagtctataggcccacccccttggcttcttatgcatgctatactgtttttggcttggggtctatacacccccgcttcctcatgttataggtgatggtatagcttagcctataggtgtgggttattgaccattattgaccactcccctattggtgacgatactttccattactaatccataacatggctctttgccacaactctctttattggctatatgccaatacactgtccttcagagactgacacggactctgtatttttacaggatgggttctcatttattatttacaaattcacatatacaacaccaccgtccccagtgcccgcagtttttattaaacataacgtgggatctccacgcgaatctcgggtacgtgttccggacatgggttcttctccggtagcggcggagcttctacatccgagccctgctcccatgcctccagcgactcatggtcgctcggcagctccttgctcctaacagtggaggccagacttaggcacagcacgatgcccaccaccaccagtgtgccgcacaaggccgtggcggtagggtatgtgtctgaaaatgagctcggggagcgggcttgcaccgctgacgcatttgaaagacttaaggcagcggcagaagaagatgcaggcagctgagttgttgtgttctgataagagtcagaggtaactcccgttgcggtgctgttaacggtggagggcagtgtagtctgagcagtactcgttgctgccgcgcgcgccaccagacataatagctgacagactaacagactgttcctttccatgggtcttttctgcagtcaccgtccttgacacgaagtttgctcgagccaccatgaaaactcactactcgagcgccattctgccgatcctgaccctcttcgtgttcctgtccatcaacccctcccatggagaagtgcaacttgtggaatcggggggaggtttggtgcaacctggaggatcattgagactgtcatgtgcagcctcgggattcaatatcaaggacacttacatccactgggtgcggcaggctccgggaaagggcctggaatgggtggcccggatctaccccaccaacggctacactcgctacgctgactccgtgaagggacgcttcactattagcgcggatacctccaagaacaccgcctacttgcaaatgaactccctccgggccgaggacaccgccgtctactactgctcgcgatgggggggagatggcttctacgcgatggactactggggccaggggacgctcgtcactgtgtcgagcgcatccactaaggggcctagcgtctttccgctggccccgtcctccaagtccacttcgggtggaaccgcggcactggggtgcctcgtgaaggactacttccccgagccggtcaccgtgtcctggaactcgggagccctgacctccggagtgcatactttccctgcggtgctgcagtcctccgggctctactcgctgtcaagcgtggtcaccgtcccgagctcatccctgggtactcagacctacatttgcaacgtgaaccacaaaccttccaacaccaaggtcgacaagaaagtggagcctaagagctgcgacaagacccacacctgtcccccgtgtcccgcccctgagctgctgggcggccccagcgtgttcctcttcccgcctaagccgaaggacactctgatgatctcgagaacccctgaagtgacctgtgtggtggtggatgtgtcccacgaggatccggaagtgaagttcaattggtacgtggacggagtggaagtccataacgccaagaccaagccccgcgaggaacagtacaactcaacttaccgggtggtgtcagtgctgaccgtgctgcaccaagattggctgaacgggaaggagtacaagtgcaaagtctccaacaaggcgctgccggcccccattgaaaagaccatcagcaaggctaagggccagccccgggaaccacaggtctacaccttgcccccttcccgggacgaactgaccaagaaccaagtgtcgctgacgtgcctggtcaagggcttttatccatctgacatcgccgtggagtgggaaagcaacggccagccggaaaacaactacaagactaccccgcctgtgctggactccgacggctcgttcttcctgtattccaagctcaccgtggataagtccagatggcagcagggcaatgtgttcagctgcagcgtgatgcatgaggccctgcacaaccactacactcagaaatcactgtccctttcccccggaaagtaaaaaattgccagccatctgttgtttgcccctcccccgtgccttccttgaccctggaaggtgccactcccactgtcctttcctaataaaatgaggaaattgcatcgcattgtctgagtaggtgtcattctattctggggggtggggtggggcaggacagcaagggggaggattggcaagacaatagcaggctttgcatttttagacatttagaagcctatatcttgttacagaattggaattacacaaaaattctaccatattttgaaagcttaggttgttctgaaaaaaacaatatattgttttcctgggtaaactaaaagtcccctcgaggaaaggcccctaaagtgaaacagtgcaaaacgttcaaaaactgtctggcaatacaagttccactttgaccaaaacggctggcagtaaaagggttaagcggtatcagctcactcaaaggcggtaatacggttatccacagaatcaggggataacgcaggaaagaacatgtgagcaaaaggccagcaaaaggccaggaaccgtaaaaaggccgcgttgctggcgtttttccataggctccgcccccctgacgagcatcacaaaaatcgacgctcaagtcagaggtggcgaaacccgacaggactataaagataccaggcgtttccccctggaagctccctcgtgcgctctcctgttccgaccctgccgcttaccggatacctgtccgcctttctcccttcgggaagcgtggcgctttctcatagctcacgctgtaggtatctcagttcggtgtaggtcgttcgctccaagctgggctgtgtgcacgaaccccccgttcagcccgaccgctgcgccttatccggtaactatcgtcttgagtccaacccggtaagacacgacttatcgccactggcagcagccactggtaacaggattagcagagcgaggtatgtaggcggtgctacagagttcttgaagtggtgggctaactacggctacactagaagaacagtatttggtatctgcgctctgctgaagccagttaccttcggaaaaagagttggtagctcttgatccggcaaacaaaccaccgctggtagcggtggtttttttgtttgcaagcagcagattacgcgcagaaaaaaaggatctcaagaagatcctttgatcttttctacggggtctgacgctcagtggaacgacgcgcgcgtaactcacgttaagggattttggtcatgagttagaaaaactcatcgagcatcaaatgaaactgcaatttattcatatcaggattatcaataccatatttttgaaaaagccgtttctgtaatgaaggagaaaactcaccgaggcagttccataggatggcaagatcctggtatcggtctgcgattccgactcgtccaacatcaatacaacctattaatttcccctcgtcaaaaataaggttatcaagtgagaaatcaccatgagtgacgactgaatccggtgagaatggcaaaagtttatgcatttctttccagacttgttcaacaggccagccattacgctcgtcatcaaaatcactcgcatcaaccaaaccgttattcattcgtgattgcgcctgagcgaggcgaaatacgcgatcgctgttaaaaggacaattacaaacaggaatcgagtgcaaccggcgcaggaacactgccagcgcatcaacaatattttcacctgaatcaggatattcttctaatacctggaacgctgtttttccggggatcgcagtggtgagtaaccatgcatcatcaggagtacggataaaatgcttgatggtcggaagtggcataaattccgtcagccagtttagtctgaccatctcatctgtaacatcattggcaacgctacctttgccatgtttcagaaacaactctggcgcatcgggcttcccatacaagcgatagattgtcgcacctgattgcccgacattatcgcgagcccatttatacccatataaatcagcatccatgttggaatttaatcgcggcctcgacgtttcccgttggatatggctcattttttacttcctcaccttgtcgtattatactatgccgatatactatgccgatgattaattgtcgacactgcgggggctctgtgtggtaagcaggtcttaacctttttactgccaatgacgcatgggatacgtcgtggcagtaaaagggcttaaatgccaacgacgcgtcccatacgttgttggcattttaattcttctctctgcagcggcagcatgtgccgccgctgcagagagtttctagcgatgacagcccctctgggcaacgagccgggggggctgtctttctttatgttttgtggtgtcttctttctttatgttttaaatgcactgacctcccacattccctttttagtaaaatattcagaaataatttaaatacatcattgcaatgaaaataaatgttttttattaggcagaatccagatgctcaaggcccttcataatatcccccagtttagtagttggacttagggaacaaaggaacctttaatagaaattggacagcaagaaagcgagaggagtagaatgttgagagtcagcagtagcctcatcatcactagatggcatttcttctgagcaaaacaggttttcctcattaaaggcattccaccactgctcccattcatcagttccataggttggaatctaaaatacacaaacaattagaatcagtagtttaacacattatacacttaaaaattttatatttaccttagagctttaaatctctgtaggtagtttgtccaattatgtcacaccacagaagtaaggttccttcacaaagatctctctggggcggggtgggatgaactaggaaaggctcaagatcactcaaagtctaattatcactgcattctagttgtggtttgtccaaactcatcaatgtatcttatcatgtctgagcggatccagtttttgtattggaagggctcgtcgccagtctcattgagaaggcatgtgcggacgatggcttctgtcactgcaaaggggtcacaattggcagaggggcggcgatcttcaaagtaacctttcttctcctggccgacagtccggggaatgcggatgctggcactgcgattggcgacaccagcagaaaagtcgttgatgttggacgtttcgtggaacccagtcagacgacgggcattgtccaggccccccttgggatcgtaggctcgaatgtggtactggtgccgcttgcttagtttctcgatggcctcctcgatgtgcttcagaccattctcctcccgcatggccttggtgctaaagttggtatggcagcctgcaccattccagttcccaggaatgggcttggggtcaaaggttgctattaccccaaagtcctcacatactcgatgcaagatgaaacgggccacccagagatgatctcccatgtggattccttcacagggtcctatttggaactcccactgggcaggcatgacctcagcatttgttcctgtaatcttgaccccagcatacaagcaggcgcggtagtgagcctccacgatatccctgccataggctttgtctgcgcccacaccacagtaatacggaccttggggcccaggaaagccattggaaggccaaccaaaagggtgcccatctgttcccatcagagtatactcctgttccattccaaaccaggggtgctggttgctcaccatgtccattatccgtttacaggagtgccttaaatttgtctctgcaggcttccggttgtacttgaaaacttcacagaacaccagcttgttgggctcccggcggaaggggtcccgaaacatggcaacagggctgagatacatgtcactgttggagccctcagactgaaaggtactagagccatcaaaattccactcaggtaactcttctacacacttgggctcacagtccagggtgcgggttttgcagcgcagtccttctccagtaccatcaacccagatatacatggcttggactttctcaccctggggcaggcacaggtacatttgcttgatgtttttgttcaagtgggaacttgctgaggtggccatgccaccctgcagagtcgctctgtgttcgaggccacacgcgtcaccttaatatgcgaagtggacctgggaccgcgccgccccgactgcatctgcgtgttttcgccaatgacaagacgctgggcggggtttgtgtcatcatagaactaaagacatgcaaatatatttcttccggggacaccgccagcaaacgcgagcaacgggccacggggatgaagcagctggaagactactctggagacgacttacggtaaatggcccgcctggctgaccgcccaacgacccccgcccattgacgtcaataatgacgtatgttcccatagtaacgccaatagggactttccattgacgtcaatgggtggagtatttacggtaaactgcccacttggcagtacatcaagtgtatcatatgccaagtccgccccctattgacgtcaatgacggtaaatggcccgcctggcattatgcccagtacatgaccttacgggactttcctacttggcagtacatctacgtattagtcatcgctattaccatgctgatgcggttttggcagtacaccaatgggcgtggatagcggtttgactcacggggatttccaagtctccaccccattgacgtcaatgggagtttgttttggcaccaaaatcaacgggactttccaaaatgtcgtaataaccccgccccgttgacgcaaatgggcggtaggcgtgtacggtgggaggtctatataagcagagctcgtttagtgaaccgtcagatcgcctggagaggccatccacgctgttttgacctccatagtggacaccgggaccgatccagcctccgcggccgggaacggtgcattggaacgcggattccccgtgccaagagtgaccctggcagaactcggtaagtctgttgacatgtatgtgatgtatactaacctgcatgggacgtggatttacttgtgtatgtcagatagagtaaagattaactcttgcatgtgagcggggcatcgagatagcgataaatgagtcaggaggacggatacttatatgtgttgttatcctcctctacagtcaaacagattaagcgtctcaggggagcttccttcttctttttcctagaagctcagaataaacgctcaactttggccgccacc

SEQ ID NO: 290 - DNA, 13142 bp, Artificial sequence
  Synthetic sequence
atgggagtgaaggtcctgttcgcactgatttgcatcgccgtggcggaagccgaagtgcaacttgtggaatcggggggaggtttggtgcaacctggaggatcattgagactgtcatgtgcagcctcgggattcaatatcaaggacacttacatccactgggtgcggcaggctccgggaaagggcctggaatgggtggcccggatctaccccaccaacggctacactcgctacgctgactccgtgaagggacgcttcactattagcgcggatacctccaagaacaccgcctacttgcaaatgaactccctccgggccgaggacaccgccgtctactactgctcgcgatgggggggagatggcttctacgcgatggactactggggccaggggacgctcgtcactgtgtcgagcgcatccactaaggggcctagcgtctttccgctggccccgtcctccaagtccacttcgggtggaaccgcggcactggggtgcctcgtgaaggactacttccccgagccggtcaccgtgtcctggaactcgggagccctgacctccggagtgcatactttccctgcggtgctgcagtcctccgggctctactcgctgtcaagcgtggtcaccgtcccgagctcatccctgggtactcagacctacatttgcaacgtgaaccacaaaccttccaacaccaaggtcgacaagaaagtggagcctaagagctgcgacaagacccacacctgtcccccgtgtcccgcccctgagctgctgggcggccccagcgtgttcctcttcccgcctaagccgaaggacactctgatgatctcgagaacccctgaagtgacctgtgtggtggtggatgtgtcccacgaggatccggaagtgaagttcaattggtacgtggacggagtggaagtccataacgccaagaccaagccccgcgaggaacagtacaactcaacttaccgggtggtgtcagtgctgaccgtgctgcaccaagattggctgaacgggaaggagtacaagtgcaaagtctccaacaaggcgctgccggcccccattgaaaagaccatcagcaaggctaagggccagccccgggaaccacaggtctacaccttgcccccttcccgggaggaaatgaccaagaaccaagtgtcgctgacgtgcctggtcaagggcttttatccatctgacatcgccgtggagtgggaaagcaacggccagccggaaaacaactacaagactaccccgcctgtgctggactccgacggctcgttcttcctgtattccaagctcaccgtggataagtccagatggcagcagggcaatgtgttcagctgcagcgtgatgcatgaggccctgcacaaccactacactcagaaatcactgtccctttcccccggaaagtaatgaggtatcgggggaggctaactgaaacacggaaggagacaataccggaaggaacccgcgctatgacggcaataaaaagacagaataaaacgcacgggtgttgggtcgtttgttcataaacgcggggttcggtcccagggctggcactctgtcgataccccaccgagtccccattggggccaatacgcccgcgtttcttccttttccccaccccaccccccaagttcgggtgaaggcccagggctcgcagccaacgtcggggcggcaggccctgccatagaaatcgataatatatggtagggttcatagccagagtaacctttttttttaatttttattttattttatttttgagtcgggcgcgccaaaatgaagtgaagttcctatactttctagagcgagctcacggggacagcccccccccaaagcccccagggatgtaattacgtccctcccccgctagggggcagcagcgagccgcccggggctccgctccggtccggcgctccccccgcatccccgagccggcagcgtgcggggacagcccgggcacggggaaggtggcacgggatcgctttcctctgaacgcttctcgctgctctttgagcctgcagacacctggggggatacggggaaaaagctttaggctgaaagagagatttagaatgacaggcgagctcacggggacagcccccccccaaagcccccagggatgtaattacgtccctcccccgctagggggcagcagcgagccgcccggggctccgctccggtccggcgctccccccgcatccccgagccggcagcgtgcggggacagcccgggcacggggaaggtggcacgggatcgctttcctctgaacgcttctcgctgctctttgagcctgcagacacctggggggatacggggaaaaagcttgaaacttgatctgtcgccgcaattcaagcttcgtgaggctccggtgcccgtcagtgacctgctatactctggagacgagcggggctgacgtcgggaggtggcctccgtgggaagggacacccggatcttgacacagccttggcagcggagtaaggaagagtagggatagattctggccgccctcttggccagcttctcgccgccccaccctccgctagggccaagagtaattcatacaaaaggagggatcgccttcgcaaggggagagcccagggaccgtccctaaattctcacagacccaaatccctgtagccgccccacgacagcgcgaggagcatgcgctcagggctgagcgcggggagagcagagcacacaagctcatagaccctggtcgtgggggggaggaccggggagctggcgcggggcaaactgggaaagcggtgtcgtgtgctggctccgccctcttcccgagggtgggggagaacggtatataagtgcggcagtcgccttggacgttctttttcgcaacgggtttgccgtcagaacgcaggtgaggggcgggtgtggcttccgcgggccgccgagctggaggtcctgctccgagcgggccgggccccgctgtcgtcggcggggattagctgcgagcattcccgcttcgagttgcgggcggcgcgggaggcagagtgcgaggcctagcggcaaccccgtagcctcgcctcgtgtccggcttgaggcctagcgtggtgtccgcgccgccgccgcgtgctactccggccgcactctggtctttttttttttgttgttgttgccctgctgccttcgattgccgttcagcaataggggctaacaaagggagggtgcggggcttgctcgcccggagcccggagaggtcatggttggggaggaatggagggacaggagtggcggctggggcccgcccgccttcggagcacatgtccgacgccacctggatggggcgaggcctggggtttttcccgaagcaaccaggctggggttagcgtgccgaggccatgtggccccagcacccggcacgatctggcttggcggcgccgcgttgccctgcctccctaactagggtgaggccatcccgtccggcaccagttgcgtgcgtggaaagatggccgctcccgggccctgttgcaaggagctcaaaatggaggacgcggcagcccggtggagcgggcgggtgagtcacccacacaaaggaagagggcctggtccctcaccggctgctgcttcctgtgaccccgtggtcctatcggccgcaatagtcacctcgggcttttgagcacggctagtcgcggcggggggaggggatgtaatggcgttggagtttgttcacatttggtgggtggagactagtcaggccagcctggcgctggaagtcatttttggaatttgtccccttgagttttgagcggagctaattctcgggcttcttagcggttcaaaggtatcttttaaacccttttttaggtgttgtgaaaaccaccgctaattcaaagcaagccgccaccatggacatgagggtccccgctcagctcctggggctcctgctgctctggctcccaggtgccaaatgtgatattcagatgacccaatccccctcctcattgagcgcgtccgtcggagacagagtgaccattacttgtcgcgcctcccaagacgtgaacaccgctgtggcttggtaccagcagaagccgggaaaggcccctaagctgctgatctactctgcctccttcctgtactcgggcgtgccgagccggttcagcgggagccggtcgggaaccgatttcactctgaccatctcgtcactgcaacccgaggactttgccacctactactgccagcagcactacaccactccaccgaccttcggacaaggcaccaaggtcgaaatcaagcgcaccgtggccgcccctagcgtgtttatcttccctccctcggatgagcagcttaagtcaggcaccgcatccgtggtctgcctgctcaacaacttctacccgagggaagccaaagtgcagtggaaagtggacaacgcgctccagtcgggaaactcccaggagtccgtgaccgaacaggactccaaggacagcacttattccctgtcctccactctgacgctgtcaaaggccgactacgagaagcacaaggtctacgcctgcgaagtgacccatcaggggctttcctcgcccgtgactaagagcttcaatcggggcgaatgctaataaaagcttaattaatggctaataaaggaaatttattttcattgcaatagtgtgttggaattttttgtgtctctcactcggaagaacatatgggagggcaaatcatttaaaacatcagaatgagtatttggtttagagtttggcaacatatgcccatatgctggctgccatgaacaaaggttggctataaagaggtcatcagtatatgaaacagccccctgctgtccattccttattccatagaaaagccttgacttgaggttagattttttttatattttgttttgtgttatttttttctttaacatccctaaaattttccttacatgttttactagccagatttttcctcctctcctgactactcccagtcatagctgtccctcttctcttatggagatcagaaaattttgtgtcgcccttcgctgaacaccaggtgggccgcctactgcgcacgcgcgggtttgcgggcagccgcctgggctgtgggagcagcccgggcagagctctcctgcctctccaccagcccaccccgccgcctgaccgccccctccccaccccccaccccccacccccggaaaacgcgtcgtcccctgggctgggtggtgacccccgtcccgcgaaacaccgggccccgcgcagcgtccgggcctgacaccgctccggcggctcgcctcctatgcgcccccgcgccaccgtcgcccgcccgcccgggcccctgcagccgcccaggtgccagcacggagcgcctggcggcggaacgcagaccccaggcccggcgcacaccggggacgctgagcgttccaggcgggagggaaggcgggcagagatggagagaggaacgggagtcctagaggggcggaaggacgggcggagggacgttaggagggagggagggaggcagggaggcagggaggaacggagggaaagacagagcgacgcagggactgggggcgggcgggagggagccggggaacggggggaggaaggcagggaggaaaagcggtcctcggcctccgggagtagcgggacccccgccctccgggaaaacggtcagcgtccggcgcgggctgagggctgggcccacagccgccgcgccggccggcggggcaccacccattcgccccggttccgtggcccagggagtgggcggtttcctccgggacaaaagaccgggactcgggttgccgtcgggtgttcacccgcgcggttcacagaccgcacatccccaggctgagccctgcaacgcggcgcgaggccgacagccccggccacggaggagccacacgcaggacgacggaggcgtgattttggtttccgcgtggctttgccctccgcaaggcggcctgttgctcaagtctctccggcccccgaaaggctggccatgccgactgtttgctcccggagctctgcgggcacccggaaacatgcagggaagggtgcaagcccggcacggtgccttcgctctccttgccaggttccaaaccggccacactgcagactccccacgttgccgcacgcgggaatccatcgtcaggccatcacgccggggaggcatctcctctctggggtgtcgctctggacttctacgtggaaatgaacgagagccacacgcctgcgtgtgccagaccgtcccggcaacggcgacgcccacaggcattgcctccttcacggagagagggcctggcacactcaagactcccacggaggttcagttccacactccacctaggtttgcatttttagacatttagaagcctatatcttgttacagaattggaattacacaaaaattctaccatattttgaaagcttaggttgttctgaaaaaaacaatatattgttttcctgggtaaactaaaagtcccctcgaggaaaggcccctaaagtgaaacagtgcaaaacgttcaaaaactgtctggcaatacaagttccactttgggacaaatcggctggcagtgaaagggttaagcggccgctcagccttgagcggtatcagctcactcaaaggcggtaatacggttatccacagaatcaggggataacgcaggaaagaacatgtgagcaaaaggccagcaaaaggccaggaaccgtaaaaaggccgcgttgctggcgtttttccataggctccgcccccctgacgagcatcacaaaaatcgacgctcaagtcagaggtggcgaaacccgacaggactataaagataccaggcgtttccccctggaagctccctcgtgcgctctcctgttccgaccctgccgcttaccggatacctgtccgcctttctcccttcgggaagcgtggcgctttctcatagctcacgctgtaggtatctcagttcggtgtaggtcgttcgctccaagctgggctgtgtgcacgaaccccccgttcagcccgaccgctgcgccttatccggtaactatcgtcttgagtccaacccggtaagacacgacttatcgccactggcagcagccactggtaacaggattagcagagcgaggtatgtaggcggtgctacagagttcttgaagtggtgggctaactacggctacactagaagaacagtatttggtatctgcgctctgctgaagccagttaccttcggaaaaagagttggtagctcttgatccggcaaacaaaccaccgctggtagcggtggtttttttgtttgcaagcagcagattacgcgcagaaaaaaaggatctcaagaagatcctttgatcttttctacggggtctgacgctcagtggaacgacgcgcgcgtaactcacgttaagggattttggtcatgagttagaaaaactcatcgagcatcaaatgaaactgcaatttattcatatcaggattatcaataccatatttttgaaaaagccgtttctgtaatgaaggagaaaactcaccgaggcagttccataggatggcaagatcctggtatcggtctgcgattccgactcgtccaacatcaatacaacctattaatttcccctcgtcaaaaataaggttatcaagtgagaaatcaccatgagtgacgactgaatccggtgagaatggcaaaagtttatgcatttctttccagacttgttcaacaggccagccattacgctcgtcatcaaaatcactcgcatcaaccaaaccgttattcattcgtgattgcgcctgagcgaggcgaaatacgcgatcgctgttaaaaggacaattacaaacaggaatcgagtgcaaccggcgcaggaacactgccagcgcatcaacaatattttcacctgaatcaggatattcttctaatacctggaacgctgtttttccggggatcgcagtggtgagtaaccatgcatcatcaggagtacggataaaatgcttgatggtcggaagtggcataaattccgtcagccagtttagtctgaccatctcatctgtaacatcattggcaacgctacctttgccatgtttcagaaacaactctggcgcatcgggcttcccatacaagcgatagattgtcgcacctgattgcccgacattatcgcgagcccatttatacccatataaatcagcatccatgttggaatttaatcgcggcctcgacgtttcccgttggatatggctcattttttacttcctcaccttgtcgtattatactatgccgatatactatgccgatgattaattgtcgacactgcgggggctctggcgcgccttaaccctttgcctgccaatcacgcatgggatacgtcgtggcagtaaaagggcttaaatgccaacgacgcgtcccatacgttgttggcattttaattcttctctctgcagcggcagcatgtgccgccgctgcagagagtttctagcgatgacagcccctctgggcaacgagccgggggggctgtcgctagcgcgagctcacggggacagcccccccccaaagcccccagggatgtaattacgtccctcccccgctagggggcagcagcgagccgcccggggctccgctccggtccggcgctccccccgcatccccgagccggcagcgtgcggggacagcccgggcacggggaaggtggcacgggatcgctttcctctgaacgcttctcgctgctctttgagcctgcagacacctggggggatacggggaaaaagctttaggctgaaagagagatttagaatgacagaatcatagaacggcctgggttgcaaaggagcacagtgctcatccagatccaaccccctgctatgtgcagggtcatcaaccagcagcccaggctgcccagagccacatccagcctggccttgaatgcctgcagggatggggcatccacagcctccttgggcaacctgttcagtgcgtcaccaccctctgggggaaaaactgcctcctcatatccaacccaaacctcccctgtctcagtgtaaagccattcccccttgtcctatcaagggggagtttgctgtgacattgttggtctggggtgacacatgtttgccaattcagtgcatcacggagaggcagatcttggggataaggaagtgcaggacagcatggacgtgggacatgctggtgttgagggctctgggacactctccaagtcacagcgttcagaacagccttaaggataagaagataggatagaaggacaaagagcaagttaaaacccagcatggagaggagcacaaaaaggccacagacactgctggtccctgtgtctgagcctgcatgtttgatggtgtctggatgcaagcagaaggggtggaagtgcttgcctggagagatacagctgggtcagtaggactgggacaggcagctggagaattgccatgtagatgttcatacaatcgtcaaatcatgaaggctggaaaagccctccaagatccccaagaccaaccccaacccacccaccgtgcccactggccatgtccctcagtgccacatccccacagttcttcatcacctccagggacggtgacccccccacctccgtgggcagctgtgccactgcagcaccgctctttggagaaggtaaatcttgctaaatccagcccgaccctcccctggcacaacgtaaggccattatctctcatccaactccaggacggagtcagtgagaatattggtaccggggtgtggtgtcttctttctttatgttttaaatgcactgacctcccacattccctttttagtaaaatattcagaaataatttaaatacatcattgcaatgaaaataaatgttttttattaggcagaatccagatgctcaaggcccttcataatatcccccagtttagtagttggacttagggaacaaaggaacctttaatagaaattggacagcaagaaagcgagaggagtagaatgttgagagtcagcagtagcctcatcatcactagatggcatttcttctgagcaaaacaggttttcctcattaaaggcattccaccactgctcccattcatcagttccataggttggaatctaaaatacacaaacaattagaatcagtagtttaacacattatacacttaaaaattttatatttaccttagagctttaaatctctgtaggtagtttgtccaattatgtcacaccacagaagtaaggttccttcacaaagatctctctggggcggggtgggatgaactaggaaaggctcaagatcactcaaagtctaattatcactgcattctagttgtggtttgtccaaactcatcaatgtatcttatcatgtctgagcggatccagtttttgtattggaagggctcgtcgccagtctcattgagaaggcatgtgcggacgatggcttctgtcactgcaaaggggtcacaattggcagaggggcggcgatcttcaaagtaacctttcttctcctggccgacagtccggggaatgcggatgctggcactgcgattggcgacaccagcagaaaagtcgttgatgttggacgtttcgtggaacccagtcagacgacgggcattgtccaggccccccttgggatcgtaggctcgaatgtggtactggtgccgcttgcttagtttctcgatggcctcctcgatgtgcttcagaccattctcctcccgcatggccttggtgctaaagttggtatggcagcctgcaccattccagttcccaggaatgggcttggggtcaaaggttgctattaccccaaagtcctcacatactcgatgcaagatgaaacgggccacccagagatgatctcccatgtggattccttcacagggtcctatttggaactcccactgggcaggcatgacctcagcatttgttcctgtaatcttgaccccagcatacaagcaggcgcggtagtgagcctccacgatatccctgccataggctttgtctgcgcccacaccacagtaatacggaccttggggcccaggaaagccattggaaggccaaccaaaagggtgcccatctgttcccatcagagtatactcctgttccattccaaaccaggggtgctggttgctcaccatgtccattatccgtttacaggagtgccttaaatttgtctctgcaggcttccggttgtacttgaaaacttcacagaacaccagcttgttgggctcccggcggaaggggtcccgaaacatggcaacagggctgagatacatgtcactgttggagccctcagactgaaaggtactagagccatcaaaattccactcaggtaactcttctacacacttgggctcacagtccagggtgcgggttttgcagcgcagtccttctccagtaccatcaacccagatatacatggcttggactttctcaccctggggcaggcacaggtacatttgcttgatgtttttgttcaagtgggaacttgctgaggtggccatgccaccctgcagagtcgctctgtgttcgaggccacacgcgtcaccttaatatgcgaagtggacctgggaccgcgccgccccgactgcatctgcgtgttttcgccaatgacaagacgctgggcggggtttgtgtcatcatagaactaaagacatgcaaatatatttcttccggggacaccgccagcaaacgcgagcaacgggccacggggatgaagcagctggaagactactctggagacgcaacctttggagctaagccagcaatggtagagggaagattctgcacgtcccttccaggcggcctccccgtcaccaccccccccaacccgccccgaccggagctgagagtaattcatacaaaaggactcgcccctgccttggggaatcccagggaccgtcgttaaactcccactaacgtagaacccagagatcgctgcgttcccgccccctcacccgcccgctctcgtcatcactgaggtggagaatagcatgcgtgaggctccggtgcccgtcagtgggcagagcgcacatcgcccacagtccccgagaagttggggggaggggtcggcaattgaacgggtgcctagagaaggtggcgcggggtaaactgggaaagtgatgtcgtgtactggctccgcctttttcccgagggtgggggagaaccgtatataagtgcagtagtcgccgtgaacgttctttttcgcaacgggtttgccgccagaacacaggtaagtgccgtgtgtggttcccgcgggcctggcctctttacgggttatggcccttgcgtgccttgaattacttccacctggctccagtacgtgattcttgatcccgagctggagccaggggcgggccttgcgctttaggagccccttcgcctcgtgcttgagttgaggcctggcctgggcgctggggccgccgcgtgcgaatctggtggcaccttcgcgcctgtctcgctgctttcgataagtctctagccatttaaaatttttgatgacgtgctgcgacgctttttttctggcaagatagtcttgtaaatgcgggccaggatctgcacactggtatttcggtttttgggcccgcggccggcgacggggcccgtgcgtcccagcgcacatgttcggcgaggcggggcctgcgagcgcggccaccgagaatcggacgggggtagtctcaagctggccggcctgctctggtgcctggcctcgcgccgccgtgtatcgccccgccctgggcggcaaggctggcccggtcggcaccagttgcgtgagcggaaagatggccgcttcccggccctgctccagggggctcaaaatggaggacgcggcgctcgggagagcgggcgggtgagtcacccacacaaaggaaaagggcctttccgtcctcagccgtcgcttcatgtgactccacggagtaccgggcgccgtccaggcacctcgattagttctggagcttttggagtacgtcgtctttaggttggggggaggggttttatgcgatggagtttccccacactgagtgggtggagactgaagttaggccagcttggcacttgatgtaattctccttggaatttggcctttttgagtttggatcttggttcattctcaagcctcagacagtggttcaaagtttttttcttccatttcaggtgtcgtgaacacgtctcaggggcagcttgcttgttctttttgcagaagctcagaataaacgctcaactttggccgccacc

SEQ ID NO: 291 - protein, 124 aa, Artificial sequence
  Synthetic sequence
MAKLTSAVPVLTARDVAGAVEFWTDRLGFSRDFVEDDFAGVVRDDVTLFISAVQDQVVPDNTLAWVWVRGLDELYAEWSEVVSTNFRDASGPAMTEIGEQPWGREFALRDPAGNCVHFVAEEQD

SEQ ID NO: 292 - protein, 152 aa, Artificial sequence
  Synthetic sequence
MVAISKNGVIGNGPDIPWSAKGEQLLFKAITYNQWLLVGRKTFESMGALPNRKYAVVTRSSFTSDNEDVLIFPSIKDALTNLKKITDHVIVSGGGEIYKSLIDQVDTLHISTIDIEPEGDVYFPEIPSNFRPVFTQDFASNINYSYQIWQKG

SEQ ID NO: 293 - protein, 187 aa, Artificial sequence
  Synthetic sequence
MVRPLNCIVAVSQNMGIGKNGDLPWPPLRNEFKYFQRMTTTSSVEGKQNLVIMGRKTWFSIPEKNRPLKDRINIVLSRELKEPPRGAHFLAKSLDDALRLIEQPELASKVDMVWIVGGSSVYQEAMNQPGHLRLFVTRIMQEFESDTFFPEIDLGKYKLLPEYPGVLSEVQEEKGIKYKFEVYEKKD

SEQ ID NO: 294 - protein, 264 aa, Artificial sequence
  Synthetic sequence
MIEQDGLHAGSPAAWVERLFGYDWAQQTIGCSDAAVFRLSAQGRPVLFVKTDLSGALNELQDEAARLSWLATTGVPCAAVLDVVTEAGRDWLLLGEVPGQDLLSSHLAPAEKVSIMADAMRRLHTLDPATCPFDHQAKHRIERARTRMEAGLVDQDDLDEEHQGLAPAELFARLKASMPDGEDLVVTHGDACLPNIMVENGRFSGFIDCGRLGVADRYQDIALATRDIAEELGGEWADRFLVLYGIAAPDSQRIAFYRLLDEFF

SEQ ID NO: 295 - protein, 267 aa, Artificial sequence
  Synthetic sequence
MGSAIEQDGLHAGSPAAWVERLFGYDWAQQTIGCSDAAVFRLSAQGRPVLFVKTDLSGALNELQDEAARLSWLATTGVPCAAVLDVVTEAGRDWLLLGEVPGQDLLSSHLAPAEKVSIMADAMRRLHTLDPATCPFDHQAKHRIERARTRMEAGLVDQDDLDEEHQGLAPAELFARLKARMPDGDDLVVTHGDACLPNIMVENGRFSGFIDCGRLGVADRYQDIALATRDIAEELGGEWADRFLVLYGIAAPDSQRIAFYRLLDEFF

SEQ ID NO: 296 - protein, 264 aa, Artificial sequence [sequence omitted]

SEQ ID NO: 297 - protein, 264 aa, Artificial sequence
  Synthetic sequence
MVEQDGLHAGSPAAWVERLFGYDWAQQTIGCSDAAVFRLSAQGRPVLFVKTDLSGALNELQDEAARLSWLATTGVPCAAVLDVVTEAGRDWLLLGEVPGQDLLSSHLAPAEKVSIMADAMRRLHTLDPATCPFDHQAKHRIERARTRMEAGLVDQDDLDEEHQGLAPAELFARLKARMPDGEDLVVTHGDACLPNIMVENGRFSGFIDCGRLGVADRYQDIALATRDIAEELGGEWADRFLVLYGIAAPDSQRIAFYRLLDEFF

SEQ ID NO: 298 - protein, 341 aa, Artificial sequence
  Synthetic sequence
MDRSGKPELTATSVEKFLIEKFDSVSDLMQLSEGEESRAFSFDVGGRGYVLRVNSCADGFYKDRYVYRHFASAALPIPEVLDIGEFSESLTYCISRRAQGVTLQDLPETELPAVLQPVAEAMDAIAAADLSQTSGFGPFGPQGIGQYTTWRDFICAIADPHVYHWQTVMDDTVSASVAQALDELMLWAEDCPEVRHLVHADFGSNNVLTDNGRITAVIDWSEAMFGDSQYEVANIFFWRPWLACMEQQTRYFERRHPELAGSPRLRAYMLRIGLDQLYQSLVDGNFDDAAWAQGRCDAIVRSGAGTVGRTQIARRSAAVWTDGCVEVLADSGNRRPSTRPR

SEQ ID NO: 299 - protein, 341 aa, Artificial sequence
  Synthetic sequence
MKKPELTATSVEKFLIEKFDSVSDLMQLSEGEESRAFSFDVGGRGYVLRVNSCADGFYKDRYVYRHFASAALPIPEVLDIGEFSESLTYCISRRAQGVTLQDLPETELPAVLQPVAEAMDAIAAADLSQTSGFGPFGPQGIGQYTTWRDFICAIADPHVYHWQTVMDDTVSASVAQALDELMLWAEDCPEVRHLVHADFGSNNVLTDNGRITAVIDWSEAMFGDSQYEVANIFFWRPWLACMEQQTRYFERRHPELAGSPRLRAYMLRIGLDQLYQSLVDGNFDDAAWAQGRCDAIVRSGAGTVGRTQIARRSAAVWTDGCVEVLADSGNRRPSTRPRAKE

SEQ ID NO: 300 - protein, 199 aa, Artificial sequence
  Synthetic sequence
MTEYKPTVRLATRDDVPRAVRTLAAAFADYPATRHTVDPDRHIERVTRAARTLPHARRARHRQGVGRATRRRGGGLDHAGERRSGGGVRRDRNAHGRVERFPAGRAATDGRPPGAAPAQGARVVPGHRRRLARPPGQGSGQRRRAPRSGGGRARRGARLPGDLRAPQPPFYERLGFTVTADVECPKDRATWCMTRKPGA

SEQ ID NO: 301 - protein, 199 aa, Artificial sequence
  Synthetic sequence
MTEYKPTVRLATRDDVPRAVRTLAAAFADYPATRHTVDPDRHIERVTELQELFLTRVGLDIGKVWVADDGAAVAVWTTPESVEAGAVFAEIGPRMAELSGSRLAAQQQMEGLLAPHRPKEPAWFLATVGVSPDHQGKGLGSAVVLPGVEAAERAGVPAFLETSAPRNLPFYERLGFTVTADVECPKDRATWCMTRKPGA

SEQ ID NO: 302 - protein, 199 aa, Artificial sequence
  Synthetic sequence
MTEYKPTVRLATRDDVPRAVRTLAAAFADYPATRHTVDPDRHIERVTELQELFLTRVGLDIGKVWVADDGAAVAVWTTPESVEAGAVFAEIGPRMAELSGSRLAAQQQMEGLLAPHRPKEPAWFLATVGVSPDHQGKGLGSAVVLPGVEAAERAGVPAFLETSAPRNLPFYERLGFTVTADVEVPEGPRTWCMTRKPGA

SEQ ID NO: 303 - protein, 132 aa, Artificial sequence
  Synthetic sequence
MAKPLSQEESTLIERATATINSIPISEDYSVASAALSSDGRIFTGVNVYHFTGGPCAELVVLGTAAAAAAGNLTCIVAIGNENRGILSPCGRCRQVLLDLHPGIKAIVKDSDGQPTAVGIRELLPSGYVWEG

SEQ ID NO: 304 - protein, 373 aa, Artificial sequence
  Synthetic sequence
MATSASSHLNKNIKQMYLCLPQGEKVQAMYIWVDGTGEGLRCKTRTLDCEPKCVEELPEWNFDGSSTFQSEGSNSDMYLSPVAMFRDPFRRDPNKLVFCEVFKYNRKPAETNLRHSCKRIMDMVSNQHPWFGMEQEYTLMGTDGHPFGWPSNGFPGPQGPYYCGVGADKAYGRDIVEAHYRACLYAGVKITGTNAEVMPAQWEFQIGPCEGIRMGDHLWVARFILHRVCEDFGVIATFDPKPIPGNWNGAGCHTNFSTKAMREENGLKHIEEAIEKLSKRHRYHIRAYDPKGGLDNARRLTGFHETSNINDFSAGVANRSASIRIPRTVGQEKKGYFEDRRPSANCDPFAVTEAIVRTCLLNETGDEPFQYKN

SEQ ID NO: 305 - protein, 373 aa, Artificial sequence
  Synthetic sequence
MATSASSHLNKGIKQMYMNLPQGEKIQLMYIWVDGTGEGLRCKTRTLDCDPKCVEELPEWNFDGSSTFQSEGSNSDMYLHPVAMFRDPFRRDPNKLVFCEVFKYNRKPAETNLRHSCKRIMDMVSSQHPWFGMEQEYTLMGTDGHPFGWPSNGFPGPQGPYYCGVGADKAYGRDIVEAHYRACLYAGIKITGTNAEVMPAQWEFQIGPCEGIRMGDHLWVARFILHRVCEDFGVIATFDPKPIPGNWNGAGCHTNFSTKAMREENGLRCIEEAIDKLSKRHQYHIRAYDPKGGLDNARRLTGFHETSNINDFSAGVANRSASIRIPRIVGQEKKGYFEDRRPSANCDPYAVTEAIVRTCLLNETGDEPFQYKN

SEQ ID NO: 306 - protein, 373 aa, Artificial sequence
  Synthetic sequence
MATSASSHLNKGIKQMYMSLPQGEKIQAMYIWVDGTGEGLRCKTRTLDCDPKCVEELPEWNFDGSSTFQSEGSNSDMYLHPVAMFRDPFRKDPNKLVLCEVFKYNRKPAETNLRHICKRIMDMVSNQHPWFGMEQEYTLMGTDGHPFGWPSNGFPGPQGPYYCGVGADKAYGRDIVEAHYRACLYAGVKITGTNAEVMPAQWEFQIGPCEGIRMGDHLWIARFILHRVCEDFGVIATFDPKPIPGNWNGAGCHTNFSTKAMREENGLKCIEEAIDKLSKRHQYHIRAYDPKGGLDNARRLTGFHETSNINDFSAGVANRSASIRIPRTVGQEKKGYFEDRRPSANCDPYAVTEAIVRTCLLNETGDEPFQYKN

SEQ ID NO: 307 - protein, 373 aa, Artificial sequence
  Synthetic sequence
MATSASSHLNKNIKQMYLCLPQGEKVQAMYIWVDGTGEGLRCKTRTLDCEPKCVEELPEWNFDGSSTFQSEGSNSDMYLSPVAMFRDPFRREPNKLVFCEVFKYNRKPAETNLRHSCKRIMDMVSNQHPWFGMEQEYTLMGTDGHPFGWPSNGFPGPQGPYYCGVGADKAYGRDIVEAHYRACLYAGVKITGTNAEVMPAQWEFQIGPCEGIHMGDHLWVARFILHRVCEDFGVIATFDPKPIPGNWNGAGCHTNFSTKAMREENGLKHIEEAIEKLSKRHQYHIRAYDPKGGLDNARRLTGFHETSNINDFSAGVANRSASIRIPRTVGQEKKGYFEDRRPSANCDPFAVTEAIVRTCLLNETGDEPFQYKN

SEQ ID NO: 308 - protein, 394 aa, Artificial sequence
  Synthetic sequence
MATSASSHLNKNIKQMYLCLPQGEKVQAMYIWVDGTGEGLRCKTRTLDCEPKCVEELPEWNFDGSSTFQSEGSNSDMYLSPVAMFRDPFRREPNKLVFCEVFKYNRKPAETNLRHSCKRIMDMVSNQHPWFGMEQEYTLMGTDGHPFGWPSNGFPGPQGPYYCGVGADKAYGRDIVEAHYRACLYAGVKITGTNAEVMPAQWEFQIGPCEGIHMGDHLWVARFILHRVCEDFGVIATFDPKPIPGNWNGAGCHTNFSTKAMREENGLKHIEEAIEKLSKRHQYHIRAYDPKGGLDNARRLTGFHETSNINDFSAGVANRSASIRIPRTVGQEKKGYFEDRRPSANCDPFAVTEAIVRTCLLNETGDEPFQYKNWIRSDMIRYIDEFGQTTTRMQ

SEQ ID NO: 309 - DNA, 1185 bp, Artificial sequence
  Synthetic sequence
atggccacctcagcaagttcccacttgaacaaaaacatcaagcaaatgtacctgtgcctgccccagggtgagaaagtccaagccatgtatatctgggttgatggtactggagaaggactgcgctgcaaaacccgcaccctggactgtgagcccaagtgtgtagaagagttacctgagtggaattttgatggctctagtacctttcagtctgagggctccaacagtgacatgtatctcagccctgttgccatgtttcgggaccccttccgccgggagcccaacaagctggtgttctgtgaagttttcaagtacaaccggaagcctgcagagacaaatttaaggcactcctgtaaacggataatggacatggtgagcaaccagcacccctggtttggaatggaacaggagtatactctgatgggaacagatgggcacccttttggttggccttccaatggctttcctgggccccaaggtccgtattactgtggtgtgggcgcagacaaagcctatggcagggatatcgtggaggctcactaccgcgcctgcttgtatgctggggtcaagattacaggaacaaatgctgaggtcatgcctgcccagtgggagttccaaataggaccctgtgaaggaatccacatgggagatcatctctgggtggcccgtttcatcttgcatcgagtatgtgaggactttggggtaatagcaacctttgaccccaagcccattcctgggaactggaatggtgcaggctgccataccaactttagcaccaaggccatgcgggaggagaatggtctgaagcacatcgaggaggccatcgagaaactaagcaagcggcaccagtaccacattcgagcctacgatcccaaggggggcctggacaatgcccgtcgtctgactgggttccacgaaacgtccaacatcaacgacttttctgctggtgtcgccaatcgcagtgccagcatccgcattccccggactgtcggccaggagaagaaaggttactttgaagatcgccgcccctctgccaattgtgacccctttgcagtgacagaagccatcgtccgcacatgccttctcaatgagactggcgacgagcccttccaatacaaaaactggatccgctcagacatgataagatacattgatgagtttggacaaaccacaactagaatgcagtga

SEQ ID NO: 310 - DNA, 178 bp, Artificial sequence
  Synthetic sequence
gcacatcgcccacagtccccgagaagttggggggaggctctggctgcaggtaattgaaccggtgcctagagaaggtggcgcggggtaaactgggaaagtgatgtcgtgtactggctccgcctttttcccgagggtgggggagaaccgtatataagtgcagtagtcgccgtgaacgttc

SEQ ID NO: 311 - DNA, 369 bp, Artificial sequence
  Synthetic sequence
acccgccccgaccggagctgagagtaattcatacaaaaggactcgcccctgccttggggaatcccagggaccgtcgttaaactcccactaacgtagaacccagagatcgctgcgttcccgccccctcacccgcccgctctcgtcatcactgaggtggagaatagcatgcgtgaggctccggtgcccgtcagtgggcagagcgcacatcgcccacagtccccgagaagttgggaggggtcggcaattgaaccggtgcctagagaaggtggcgcggggtaaactgggaaagtgatgtcgtgtactggctcagcctttttcccgagggtgggggagaaccgtatataagtgcagtagtcgccgtgaacgttc

SEQ ID NO: 312 - DNA, 369 bp, Artificial sequence
  Synthetic sequence
acccgccccgaccggagctgagagtaattcatacaaaaggactcgcccctgccttggggaatcccagggaccgtcgttaaactcccactaacgtagaacccagagatcgctgcgttcccgccccctcacccgcccgctctcgtcatcactgaggtggagaatagcatgcgtgaggctccggtgcccgtcagtgggcagagcgcacatcgcccacagtccccgagaagttgggaggggtcggcaattgaaccggtgcctagagaaggtggcgcggggtaaactgggaaagtgatgtcgtgtactggctccgcctttttcccgagggtgggggagaaccgtatataagtgcagtagtcgccgtgaacgttc

SEQ ID NO: 313 - DNA, 372 bp, Artificial sequence
  Synthetic sequence
acccgccccgaccggagctgagagtaattcatacaaaaggactcgcccctgccttggggaatcccagggaccgtcgttaaactcccactaacgtagaacccagagatcgctgcgttcccgccccctcacccgcccgctctcgtcatcactgaggtggagaatagcatgcgtgaggctccggtgcccgtcagtgggcagagcgcacatcgcccacagtccccgagaagttggggggaggggtcggcaattgaaccggtgcctagagaaggtggcgcggggtaaactgggaaagtgatgtcgtgtactggctccgcctttttcccgagggtgggggagaaccgtatataagtgcagtagtcgccgtgaacgttc

SEQ ID NO: 314 - DNA, 372 bp, Artificial sequence
  Synthetic sequence
acccgccccgaccggagctgagagtaattcatacaaaaggactcgcccctgccttggggaatcccagggaccgtcgttaaactcccactaacgtagaacccagagatcgctgcgttcccgccccctcacccgcccgctctcgtcatcactgaggtggagaatagcatgcgtgaggctccggtgcccgtcagtgggcagagcgcacatcgcccacagtccccgagaagttggggggaggggtcggcaattgaacgggtgcctagagaaggtggcgcggggtaaactgggaaagtgatgtcgtgtactggctccgcctttttcccgagggtgggggagaaccgtatataagtgcagtagtcgccgtgaacgttc

SEQ ID NO: 315 - DNA, 372 bp, Artificial sequence
  Synthetic sequence
acccgccccgaccggagctgagagtaattcatacaaaaggactcgcccctgccttggggaatcccagggaccgtcgttaaactcccactaacgtagaacccagagatcgctgcgttcccgccccctcacccgcccgctctcgtcatcactgaggtggagaatagcatgcgtgaggctccggtgcccgtcagtgggcagagcgcacatcgcccacagtccccgagaagttggggggaggggtcggcaattgatccggtgcctagagaaggtggcgcggggtaaactgggaaagtgatgtcgtgtactggctccgcctttttcccgagggtgggggagaaccgtatataagtgcagtagtcgccgtgaacgttc

SEQ ID NO: 316 - DNA, 570 bp, Artificial sequence
  Synthetic sequence
ctgggctgagacccgcagaggaagacgctctagggatttgtcccggactagcgagatggcaaggctgaggacgggaggctgattgagaggcgaaggtacaccctaatctcaatacaacctttggagctaagccagcaatggtagagggaagattctgcacgtcccttccaggcggcctccccgtcaccaccccccccaacccgccccgaccggagctgagagtaattcatacaaaaggactcgcccctgccttggggaatcccagggaccgtcgttaaactcccactaacgtagaacccagagatcgctgcgttcccgccccctcacccgcccgctctcgtcatcactgaggtggagaagagcatgcgtgaggctccggtgcccgtcagtgggcagagcgcacatcgcccacagtccccgagaagttggggggaggggtcggcaattgaaccggtgcctagagaaggtggcgcggggtaaactgggaaagtgatgtcgtgtactggctccgcctttttcccgagggtgggggagaaccgtatataagtgcagtagtcgccgtgaacgttc

SEQ ID NO: 317 - DNA, 168 bp, Artificial sequence
  Synthetic sequence
gcacatcgcccacagtccccgagaagttgggaggggtcggcaattgaaccggtgcctagagaaggtggcgcggggtaaactgggaaagtgatgtcgtgtactggctccgcctttttcccgagggtgggggagaaccgtatataagtgcagtagtcgccgtgaacgttc

SEQ ID NO: 318 - DNA, 171 bp, Artificial sequence
  Synthetic sequence
gcacatcgcccacagtccccgagaagttggggggaggggtcggcaattgaaccggtgcctagagaaggtggcgcggggtaaactgggaaagtgatgtcgtgtactggctccgcctttttcccgagggtgggggagaaccgtatataagtgcagtagtcgccgtgaacgttc

SEQ ID NO: 319 - DNA, 171 bp, Artificial sequence
  Synthetic sequence
gcacatcgcccacagtccccgagaagttggggggaggggtcggcaattgaacgggtgcctagagaaggtggcgcggggtaaactgggaaagtgatgtcgtgtactggctccgcctttttcccgagggtgggggagaaccgtatataagtgcagtagtcgccgtgaacgttc

SEQ ID NO: 320 - DNA, 168 bp, Artificial sequence
  Synthetic sequence
gcacatcgcccacagtccccgagaagttgggaggggtcggcaattgaaccggtgcctagagaaggtggcgcggggtaaactgggaaagtgatgtcgtgtactggctcagcctttttcccgagggtgggggagaaccgtatataagtgcagtagtcgccgtgaacgttc

SEQ ID NO: 321 - DNA, 171 bp, Artificial sequence
  Synthetic sequence
gcacatcgcccacagtccccgagaagttggggggaggggtcggcaattgatccggtgcctagagaaggtggcgcggggtaaactgggaaagtgatgtcgtgtactggctccgcctttttcccgagggtgggggagaaccgtatataagtgcagtagtcgccgtgaacgttc

SEQ ID NO: 322 - DNA, 440 bp, Artificial sequence
  Synthetic sequence
agcggggctgacgtcgggaggtggcctccgtgggaagggacacccggatcttgacacagccttggcagcggagtaaggaagagtagggatagattctggccgccctcttggccagcttctcgccgccccaccctccgctagggccaagagtaattcatacaaaaggagggatcgccttcgcaaggggagagcccagggaccgtccctaaattctcacagacccaaatccctgtagccgccccacgacagcgcgaggagcatgcgctcagggctgagcgcggggagagcagagcacacaagctcatagaccctggtcgtgggggggaggaccggggagctggcgcggggcaaactgggaaagcggtgtcgtgtgctggctccgccctcttcccgagggtgggggagaacggtatataagtgcggcagtcgccttggacgtt

SEQ ID NO: 323 - DNA, 480 bp, Artificial sequence
  Synthetic sequence
agcggggctgacgtcgggaggtggcctccgtgggaagggacacccggatcttgacacagccttggcagcggagtaaggaagagtagggatagattctggccgccctcttggccagcttctcgccgccccaccctccgctagggccaagagtaattcatacaaaaggagggatcgccttcgcctggggaagtcccagggaccgtcgctaaattctcataacccataatcccggtacccgccccaccacagtgcgaggagcatgcgctcagggctgagcgcggggagagcagagcacacaagctcatagaccctggtcgtggggggaggggcgcactgagcggggggggggggggtgatgggggggaggaccggggagctggcgcggggcaaactgggaaagcggtgtcgtgtgctggctccgccctcttcccgagggtgggggagaacggtatataagtgcggcagtcgccttggacgttc

SEQ ID NO: 324 - DNA, 316 bp, Artificial sequence
  Synthetic sequence
ggagccgagagtaattcatacaaaaggagggatcgccttcgcaaggggagagcccagggaccgtccctaaattctcacagacccaaatccctgtagccgccccacgacagcgcgaggagcatgcgcccagggctgagcgcgggtagatcagagcacacaagctcacagtccccggcggtggggggaggggcgcgctgagcgggggccagggagctggcgcggggcaaactgggaaagtggtgtcgtgtgctggctccgccctcttcccgagggtgggggagaacggtatataagtgcggtagtcgccttggacgtt

SEQ ID NO: 325 - DNA, 503 bp, Artificial sequence
  Synthetic sequence
cctctcccggccagaggagcaaggtatgcgggaggcgaccaggaggatagcggggctgacgtcgggaggtggcctccgtgggaaggacacccggatcttgacacagccttggcagcggagtcaggaagagtaggggtaggttctggacgccctcttggccagctcatcgccgccccaccctctgctggagcacagagtaattcatacaaaaggagggatcgccttcgcaaggggagagcccagggaccgtccctaaattctcacagacccaaatccctgtagccgccccacgacagcgcgaggagcatgcgcccagggctgagcgcgggtagatcagagcacacaagctcacagtccccggcggtggggggaggggcgcgctgagcgggggccagggagctggcgcggggcaaactgggaaagtggtgtcgtgtgctggctccgccctcttcccgagggtgggggagaacggtatataagtgcggtagtcgccttggacgttc

SEQ ID NO: 326 - DNA, 503 bp, Artificial sequence
  Synthetic sequence
cctctcccggccagaggagcaaggtatgcgggaggcgaccaggaggatagcggggctgacgtcgggaggtggcctccgtgggaaggacacccggatcttgacacagccttggcagcggagtcaggaagagtaggggtaggttctggacgccctcttggccagctcttcgccgccccaccctctgctggagcacagagtaattcatacaaaaggagggatcgccttcgcaaggggagagcccagggaccgtccctaaattctcacagacccaaatccctgtagccgccccacgacagcgcgaggagcatgcgcccagggctgagcgcgggtagatcagagcacacaagctcacagtccccggcggtggggggaggggcgcgctgagcgggggccagggagctggcgcggggcaaactgggaaagtggtgtcgtgtgctggctccgccctcttcccgagggtgggggagaacggtatataagtgcggtagtcgccttggacgttc

SEQ ID NO: 327 - DNA, 301 bp, Artificial sequence
  Synthetic sequence
ggagccgagagtaattcatacaaaaggagggatcgccttcgcaaggggagagcccagggaccgtccctaaattctcacagacccaaatccctgtagccgccccacgacagcgcgaggagcatgcgctcagggctgagcgcggggagagcagagcacacaagctcatagaccctggtcgtgggggggaggaccggggagctggcgcggggcaaactgggaaagcggtgtcgtgtgctggctccgccctcttcccgagggtgggggagaacggtatataagtgcggcagtcgccttggacgtt

SEQ ID NO: 328 - DNA, 459 bp, Artificial sequence
  Synthetic sequence
ggcggggctgacgtcgggaggtggcctccacgggaagggacacccggatctcgacacagccttggcagtggagtcaggaagggtaggacagattctggacgccctcttggccagtcctcaccgccccacccccgatggagccgagagtaattcatacaaaaggagggatcgccttcgcccctgggaatcccagggaccgtcgctaaattctggccggcctcccagcccggaaccgctgtgcccgcccagcgcggcgggaggagcctgcgcctagggcggatcgcgggtcggcgggagagcacaagcccacagtccccggcggtgggggaggggcgcgctgagcgggggcccgggagccagcgcggggcaaactgggaaagtggtgtcgtgtgctggctccgccctcttcccgagggtgggggagaacggtataaaagtgcggtagtcgcgttggacgtt

SEQ ID NO: 329 - DNA, 600 bp, Artificial sequence
  Synthetic sequence
ggggactctgaaggcaaagacggaggaggagcctgccccgggcgcgtatgggaccagcagaagaagctgttcaaggggtttgtccaggacccgcgagaggtcaaggctgaggacgggaggcgtactgcggggtgaagggataccccaacctggataccatctttgcaaagaaagcaggaacggtggagggaagattctaagcgtccccgcctggccgtctactctccgccccacccccagctgcagctgagagtaattcatacaaaaggaggactcgccttggcctcggggaatcccagggaccgtcggtaaactcccactaacctagaaccgagggctcgctcgtccccgcctcccaccccgcgctctcgtcatcatcggggtcgagaggagcatgcgcaaggcgacgggtgcttttcagtgggctgagcgcacatcgcccacggtccccgaaacgttgggggaggggacggcgattgaacgggtgcccggtggaggtggcgcggggtaaactgggaaagtcgtgtcgtgtgctgactccgccctcttcccgagggtgggggaggaccgtatataagtgccgtagtcctcttgaacgtt

SEQ ID NO: 330 - DNA, 451 bp, Artificial sequence
  Synthetic sequence
gccaggggtgaggccaagacccgcggcagggcgaaggcacaccccagtgtccactcaacctctgtgctaagccacgaagaaaaggaagattctggactgcctttctggcgattcctagccgccccacccccggctggaaccaggagtaattcatacaaaaggaggactcgcctctgccctcgggaatcccagggaccgtcgataaattctcttaatacccgccccgcggcctccgagtcgaggagagcatgggccgccgaactggttgcggatcagggcgccgagcccacagcatcacggtccccgagggcgggggaggggacggcaagggagcaaggccaggaggaggcggcgcggggcaaactgggaaagtggtgtcgtgtgctggctccgccctctttccgagggtgggggagaacggtatataagtgccgtagtcgccctggacgtt

SEQ ID NO: 331 - DNA, 525 bp, Artificial sequence
  Synthetic sequence
gcctggtccggggtgcgagcatcacgcctagaggctcccaacgggccaggtggcaggtgggcgacaggggaaagggacacctcactcttggcggctgagccaggaacggcagaggaacattctgggcgcccctactggccttttcctcgccgccccattcccgggtgaagctgagagtaattcatacagaagaactcgcctttgcctcggggaatcccagggaccgtggttaaactcccactaacttaaaagcgaaggatctccggggccccgcccccggctctcgtcaacctcggggtcgagaggagcatgcgcaaggagctgggtacgggtcagtgggctcagcgcacatcgcccatggtccccgagaactggttggggggaggggagaggggcggtgattgaacgagtgcctactggaggttgcgcggtgtaaactgggaaagtggtgtcgtgtgcgggctccgccctcttcccgagggtgggggagaaccgtatataagtgccgtagtcgccctggacgtt

SEQ ID NO: 332 - DNA, 220 bp, Artificial sequence
  Synthetic sequence
tggtgatgcggttttggcagtacatcaatgggcgtggatagcggtttgactcacggggatttccaagtctccaccccattgacgtcaatgggagtttgttttggcaccaaaatcaacgggactttccaaaatgtcgtaacaactccgccccattgacgcaaatgggcggtaggcgtgtacggtgggaggtctatataagcagagctcgtttagtgaaccg

SEQ ID NO: 333 - DNA, 220 bp, Artificial sequence
  Synthetic sequence
tgctgatgcggttttggcagtacaccaatgggcgtggatagcggtttgactcacggggatttccaagtctccaccccattgacgtcaatgggagtttgttttggcaccaaaatcaacgggactttccaaaatgtcgtaataaccccgccccgttgacgcaaatgggcggtaggcgtgtacggtgggaggtctatataagcagagctcgtttagtgaaccg

SEQ ID NO: 334 - DNA, 220 bp, Artificial sequence
  Synthetic sequence
tagtgatgcggttttggcagtacatcaatgggcgtggatagcggtttgactcacggggatttccaagtctccaccccattgacgtcaatgggagtttgttttggcaccaaaatcaacgggactttccaaaatgtcgtaacaactccgccccattgacgcaaatgggcggtaggcgtgtacggtgggaggtctatataagcagagctcgtttagtgaaccg

SEQ ID NO: 335 - DNA, 220 bp, Artificial sequence
  Synthetic sequence
tggtgatgcggttttggcagtacatcaatgggcgtggatagcggtttgactcacggggatttccaagtctccaccccattgacgtcaatgggagtttgttttggcaccaaaatcaacgggactttccaaaatgtcgtaacaactccgccccattgacgcaaatgggcggtaggcgtgtacggtgggaggtctatataagcagcgcgcgtttagtgaaccg

SEQ ID NO: 336 - DNA, 220 bp, Artificial sequence
  Synthetic sequence
tggtgatgcggttttggcagtacaccaatgggcgtggatagcggtttgactcacggggatttccaagtctccaccccattgacgtcaatgggagtttgttttggcaccaaaatcaacgggactttccaaaatgtcgtaataaccccgccccgttgacgcaaatgggcggtaggcgtgtacggtgggaggtctatataagcagagctcgtttagtgaaccg

SEQ ID NO: 337 - DNA, 314 bp, Artificial sequence
  Synthetic sequence
agtcattgggtttttccagccatttaattaaaacgccatgtactttcccaccattgacgtcaatgggctattgaaactaatgcaacgtgacctttaaacggtactttcccatagctgattaatgggaaagtaccgttctcgagccaatacacgtcaatgggaagtgaaagggcagccaaaacgtaacaccgccccggttttcccctggaaattccatattggcactcattctattggctgagctgcgttctacgtgggtataagaggcgcgaccagcgtcggtaccgtcgcagtcttcggtctgaccaccgtag

SEQ ID NO: 338 - DNA, 313 bp, Artificial sequence
  Synthetic sequence
agtcattgggtttttccagccaatttataaaacgccatgtactttcccaccattgacgtcaatgggctattgaaactaatgcaacgtgacctttaaacggtactttcccatagctgattaatgggaaagtaccgttctcgagccaatacacgtcaatgggaagtgaaagggcagccaaaacgtaacaccgccccggttttcccctggaaattccatattggcacgcattctattggctgagctgcgttctacgtgggtataagaggcgcgaccagcgtcggtaccgtcgcagtcttgggtctgaccaccgtag

SEQ ID NO: 339 - DNA, 315 bp, Artificial sequence
  Synthetic sequence
agtcattgggtttttccagccaatttaattaaaacgccatgtactttcccaccattgacgtcaatgggctattgaaactaatgcaacgtgacctttaaacggtactttcccatagctgattaatgggaaagtaccgttctcgagccaatacacgtcaatgggaagtgaaagggcagccaaaacgtaacaccgccccggttttcccctggaaattccatattggcacgcattctattggctgagctgcgttctacgtgggtataagaggcgcgaccagcgtcggtaccgtcgcagtcttcggtctgaccaccgtag

SEQ ID NO: 340 - DNA, 283 bp, Artificial sequence
  Synthetic sequence
agtcattgggtttttccagccaatttataaaacgccatgtactttcccaccattgacgtcaatgggctattgaaactaatgcaacgtgacctttaaacggtactttcccatagctgattaatgggaaagtaccgttctcgagccaatacacgtcaatgggaagtgaaagggcagccaaaacgtaacaccgccccggttttcccctggaaattccatattggcacgcattctattggctgagctgcgttctacgtgggtataagaggcgcgaccagcgtcggta

SEQ ID NO: 341 - DNA, 293 bp, Artificial sequence
  Synthetic sequence
aaaggccattgagtcaccacccctatgctgggaaatggtgaacgccccctatgtggaaagtccctatgggccgccattagagtgcatgaccgtgctgattcatatgccatatgagtgtattagggggctttccgcgtgggaaattgggtaaaaagtccccgtattactcacatagggggcgtttggctttgcaaattaggggatttcagtgcatttggcattaaaaactattggttctagtcataaaacgggcggagttaaccatataattgctgtcccccatgccattcgag

SEQ ID NO: 342 - DNA, 238 bp, Artificial sequence
  Synthetic sequence
tactaatggggatttccaatgactaatacaacgggcagtacgcccagtacgtatgactaatgggactttccataatcccgccccattgacgtcaatgggcatccgttctggcaccaaaatgaatgggaatttccaatatgagtcataaaccccgccccattgacgcacattacacgtcaatgggcggtaggcgtgccctatgggcggtctatataagcagagcccgtttagtgaaccg

SEQ ID NO: 343 - DNA, 220 bp, Artificial sequence; identical to SEQ ID NO: 333
  Synthetic sequence

SEQ ID NO: 344 - DNA, 783 bp, Artificial sequence
  Synthetic sequence
tattaatagcaatcttagctaattaaaatagatagcgtttattgagcgttgggtatcaggcacggtcctaattcttttagatgtctttagttcgtttcactctcccccaaacaatagggtggtattgatcacctccgagcaggtgaaattgaggcacagagaaatcctagtagctggtagaagaacacgcagtgtggtcaagctagcaaggtgtttggtccactgctatatctacaaaacccctaacaatgcctggtgtatagatgctcagtatgcatttgtgggatcagtgattccgatgcctgcttcttataaagtttttatttagaaataattacaggtaaggagttgcaaaaacagtatagtgggatcgagtgtcctttttccctcggcttctcccaggggtatcgtcttacgtaacaatgtccaaacagggaaattgacttgggtataatccacagactctattcaccttgtagattggttttaatagaagtaactggacaacttgtaagctaatatcgttgctatggttctcgttctcagctaaaacggcgctctttactttgtgcacctgaacactgcacaccgagggcgaccaccgcccccgagatgcccagcttctattctagagcgccgcgccggcgccgaatgggttaacgggcggggggacacgcctccgtgcgcttgcgcggcgtcccttcgccccgccttcgcagcgcagtcacatgacccgcccaaccggcgtccgcctataaaaagctgagtgttgacgtcagcgtt

SEQ ID NO: 345 - DNA, 335 bp, Artificial sequence
  Synthetic sequence
ggatccaacttctaagtccgttttttattgatctaaaaggccttttgcgaatcatcttgaaggcaatcgcgttctgagccacctcagctttggcacacagcgcggggactgtcgcgaggggtttagggcccaagcaggacacaccccgaaatctccgcagccacccccaccccacgcccccggctcttgagggttaaatcgcaggcgcaggttctcgcacgcgcacatcatcccgcaggcgagccccagcacccagcccagggtgcgcgcgcgccgtcacgtgacacgcccaaccggcgtcgccgtataaaagcgcgggcgttgacgtcagcggt

SEQ ID NO: 346 - DNA, 335 bp, Artificial sequence
  Synthetic sequence
ggatccaacttctaagtccgttttttattgatctaaaaggccttttgcgaatcatcttgaaggcaatcgcgttctgagccacctcagctttggcacacagcgcggggactgtcgcgaggggtttagggcccaagcaggacacaccccgaaatctccgcagccacccccaccccacgcccccggctcttgagggttaaatcgcaggcgctggttctcgcacgcgcacatcatcccgcaggcgagccccagcacccagcccagggtgcgcgcgcgccgtcacgtgacacgcccaaccggcgtcgccgtataaaagcgcgggcgttgacgtcagcgtt

SEQ ID NO: 347 - DNA, 343 bp, Artificial sequence
  Synthetic sequence
tgacttgggtataatccacagactctattcaccttgtagattggttttaatagaagtaactggacaacttgtaagctaatatcgttgctatggttctcgttctcagctaaaacggcgctctttactttgtgcacctgaacactgcacaccgagggcgaccaccgcccccgagatgcccagcttctattctagagcgccgcgccggcgccgaatgggttaacgggcggggggacacgcctccgtgcgcttgcgcggcgtcccttcgccccgccttcgcagcgcagtcacatgacccgcccaaccggcgtccgcctataaaaagctgagtgttgacgtcagcgtt

SEQ ID NO: 348 - DNA, 329 bp, Artificial sequence
  Synthetic sequence
cggtccgaatttcaaagtctttttcctattgacctacaaggttttcaagaatcatgttgtaagcaactgtgttctgaggaatctatgtttaaaaacccatccgtggatcttggcccagggtccagagactgagctagccacgccccggccgcgccgcagccactcccacggcagttcaagtgttaagtcccaaagaccgcgctctgtgcatgcgcagacccgtccacagctggctcctagccaacccggccggacgagcacccggcgccgtcacgtgacgcacccaaccggcgtcgacctataaaaggccgggcgttgacgtcagcggt

SEQ ID NO: 349 - DNA, 329 bp, Artificial sequence
  Synthetic sequence
cggtccgaatttcaaagtctttttcctattgacctacaaggttttcaagaatcatgttgtaagcaactgtgttctgaggaatctatgtttaaaaacccatccgtggatcttggcccagggtccagagactgagctagccacgccccggccgcgccgcagccactcccacggcagttcaagtgttaagtcccaaagaccgcgctctgtgcatgcgcagacccgtccacagctggctcctagccaacccggccggacgagcacccggcgccgtcacgtgacgcacccaaccggcgtcgacctataaaaggccgggcgttgacgtcagcgtt

SEQ ID NO: 350 - DNA, 325 bp, Artificial sequence
  Synthetic sequence
gggtccgaatttcaaagtcctttttattgacttacaaggttttcaaggaaaatcttggaagtaactgtgttccgaagaatctacgtttaaaaaccgacccctggatctttgccttgggtccaaggaccgagctggccacgccccagccgcgccgcagccactcccaaggcagttcaagtgttaagcccgaaaggtagagctctgcgcatgtgcacacccgtccatagctgggtcccagccaaccaggccggaggagcacccgcgccgtcacgtgacgtgcccaaccggcgtcgacctataaaaggccgggcgttgacgtcagcgg

SEQ ID NO: 351 - DNA, 326 bp, Artificial sequence
  Synthetic sequence
gggtccgaatttcaaagtcctttttattgacttacaaggttttcaaggaaaatcttggaagtaactgtgttccgaagaatctacgtttaaaaaccgacccctggatctttgccttgggtccaaggaccgagctggccacgccccagccgcgccgcagccactcccaaggcagttcaagtgttaagcccgaaaggtagagctctgcgcatgtgcacacccgtccatagctgggtcccagccaaccaggccggaggagcacccgcgccgtcacgtgacgtgcccaaccggcgtcgacctataaaaggccgggcgttgacgtcagcgtt

SEQ ID NO: 352 - DNA, 169 bp, Artificial sequence
  Synthetic sequence
ttcgccccgccttcgcagcgcagtcacatgacccgcccaaccggcgtccgcctataaaaagctgagtgttgacgtcagcgttctcttccgccgtcgtcgccgccatcctcggcgcgactcgcttctttcggttctacctgggagaatccaccgccatccgccaccacca

SEQ ID NO: 353 - DNA, 163 bp, Artificial sequence
  Synthetic sequence
agcccagggtgcgcgcgcgccgtcacgtgacacgcccaaccggcgtcgccgtataaaagcgcgggcgttgacgtcagcgttctcttccgccgcagccgccgccatcgtcggcgcccctcgcacttctcctgtgcccgtgagaatccgtcgccatccgccacca

SEQ ID NO: 354 - DNA, 164 bp, Artificial sequence
  Synthetic sequence
ggccggacgagcacccggcgccgtcacgtgacgcacccaaccggcgtcgacctataaaaggccgggcgttgacgtcagcgttctcttccgccgcagccgccgccatcgtcggcgcgcttccctgttcacctctgactctgagaatccgtcgccatccgccacca

SEQ ID NO: 355 - DNA, 280 bp, Artificial sequence
  Synthetic sequence
tggtcgaggtgagccccacgttctgcttcactctccccatctcccccccctccccacccccaattttgtatttatttattttttaattattttgtgcagcgatgggggcggggggggggggggcgcgcgccaggcggggcggggcggggcgaggggcggggcggggcgaggcggagaggtgcggcggcagccaatcagagcggcgcgctccgaaagtttccttttatggcgaggcggcggcggcggcggccctataaaaagcgaagcgcgcggcgggcgg

SEQ ID NO: 356 - DNA, 282 bp, Artificial sequence
  Synthetic sequence
tggtcgaggtgagccccacgttctgcttcactctccccatctcccccccctccccacccccaattttgtatttatttattttttaattattttgtgcagcgatgggggcggggggggggggggggcgcgcgccaggcggggcggggcggggcgaggggcggggcggggcgaggcggagaggtgcggcggcagccaatcagagcggcgcgctccgaaagtttccttttatggcgaggcggcggcggcggcggccctataaaaagcgaagcgcgcggcgggcgg

SEQ ID NO: 357 - DNA, 280 bp, Artificial sequence
  Synthetic sequence
tggtcgaggtgagccccacgttctgcttcactctccccatctcccccccctccccacccccaattttgtatttatttattttttaattattttgtgcagcgatgggggcggggggggggggggcgcgcgccaggtggggcggggcggggcgaggggcggggcggggcgaggcggagaggtgcggcggcagccaatcagagcggcgcgctccgaaagtttccttttatggcgaggcggcggcggcggcggccctataaaaagcgaagcgcgcggcgggcgg

SEQ ID NO: 358 - DNA, 283 bp, Artificial sequence
  Synthetic sequence
tgggtcgaggtgagccccacgttctgcttcactctccccatctcccccccctccccacccccaattttgtatttatttattttttaattattttgtgcagcgatgggggcggggggggggggggcgcgcgccaggcggggcggggcggggcgaggggcggggcggggcgaggcggagaggtgcggcggcagccaatcagagcggcgcgctccgaaagtttccttttatggcgaggcggcggcggcggcggccctataaaaagcgaagcgcgcggcgggcggga

SEQ ID NO: 359 - DNA, 270 bp, Artificial sequence
  Synthetic sequence
tctctctttttttttttttttttttttttttttccaaaaggaggggagagggggtaaaaaaatgctgcactgtgcggctaggccggtgagtgagcggcgcggagccaatcagcgctcgccgttccgaaagttgccttttatggctcgagtggccgctgtggcgtcctataaaacccggcggcgcaacgcgcagccactgtcgagtccgcgtccacccgcgagcacaggcctttcgcagctctttcttcgccgctccacacccgccaccag

SEQ ID NO: 360 - DNA, 294 bp, Artificial sequence
  Synthetic sequence
tcaatctcgctttctctctcgctttttttttttttcttcttctttttttttttttttttcaaaaggaggggagagggggtaaaaaaatgctgcactgtgcggcgaggccggtgagtgagcgacgcggagccaatcagcgcccgccgttccgaaagttgccttttatggctcgagtggccgctgtggcgtcctataaaacccggcggcgcaacgcgcagccactgtcgagtcgcgtccacccgcgagcacagcttctttgcagctccttcgttgccggtccacacccgccaccag

SEQ ID NO: 361 - DNA, 230 bp, Artificial sequence
  Synthetic sequence
tcaatctcgctttctctctcgcttttttttttttcttcttctttttttttttttttttcaaaaggaggggagagggggtaaaaaaatgctgcactgtgcggcgaggccggtgagtgagcgacgcggagccaatcagcgcccgccgttccgaaagttgccttttatggctcgagtggccgctgtggcgtcctataaaacccggcggcgcaacgcgcagccactgtcgagtc

SEQ ID NO: 362 - DNA, 308 bp, Artificial sequence
  Synthetic sequence
acctcttcctcaactcacttctctctactctcacttttttttttcttcttcttttttttttttttttttttttttttttttgcaaaagaagggggtaaaaaaatgctgcactgtcgggcgaggccggtgagtgagcgagccggagccaatcagcgcccgccgttccgaaattgccttttatggctcgagtggccgctgtggcgtcctataaaacccggcggcgcaacgcgcgccactgtcgagtccgcgtccacccgcgagtacaacctccttgcagctcctccgtcccggtccacacccgccaccag

SEQ ID NO: 363 - DNA, 253 bp, Artificial sequence
  Synthetic sequence
gcccagcaccccaaggcggccaacgccaaaactctccctcctcctcttcctcaatctcgctctcgctctttttttttttcgcaaaaggaggggagagggggtaaaaaaatgctgcactgtgcggcgaagccggtgagtgagcggcgcggggccaatcagcgtgcgccgttccgaaagttgccttttatggctcgagcggccgcggcggcgccctataaaacccagcggcgcgacgcgccaccaccgccgagtc

SEQ ID NO: 364 - DNA, 61 bp, Artificial sequence
  Synthetic sequence
ttgccttttatggctcgagtggccgctgtggcgtcctataaaacccggcggcgcaacgcgc

SEQ ID NO: 365 - DNA, 494 bp, Artificial sequence
  Synthetic sequence
atgacgtcgaggagaagttccccaactttcccgcctctcagcctttgaaagaaagaaaggggagggggcaggccgcgtgcagccgcgagcggtgctgggctccggctccaattccccatctcagtcgttcccaaagtcctcctgtttcatccaagcgtgtaagggtccccgtccttgactccctagtgtcctgctgcccacagtccagtcctgggaaccagcaccgatcacctcccatcgggccaatctcagtcccttcccccctacgtcggggcccacacgctcggtgcgtgcccagttgaaccaggcggctgcggaaaaaaaaaagcggggagaaagtagggcccggctactagcggttttacgggcgcacgtagctcaggcctcaagaccttgggctgggactggctgagcctggcgggaggcggggtccgagtcaccgcctgccgccgcgcccccggtttctataaattgagcccgcagcctcccgcttc

SEQ ID NO: 366 - DNA, 486 bp, Artificial sequence
  Synthetic sequence
tttttgtagaaatgtcttggtgtcctcgtccaatcaggtagccatctctgaaatatctggctccgttgcaactccgaacgacctgctggcaacgtaaaattctccggggtaaaacttaaatgtggagtaatggaaccagaaacatctcttcccttctctctccttccaccgcccgttaccgtccctaggaaattttactctgctggagagcttcttctacggcccccttgcagcaatgcacttcccagcattacgttgcgggtaaaacggaggtcgtgtacccgacctagcagcccagggatggaaaagtcccggccgtcgctggcaataatagcgggcggacgcatgtcatgagattattggaaaccaccagaatcgaatataaaaggcgaacacctttcccaattttggtttctcctgacccaaagactttaaatttaatttatttgtccctatttcaatcaattgaacaactatcaaaacaca

SEQ ID NO: 367 - DNA, 486 bp, Artificial sequence
  Synthetic sequence
tttttgtagaaatgtcttggtgtcctcgtccaatcaggtagccatctctgaaatatctggctccgttgcaactccgaacgacctgctggcaacgtaaaattctccggggtaaaacttaaatgtggagtaatggaaccagaaacgtctcttcccttctctctccttccaccgcccgttaccgtccctaggaaattttactctgctggagagcttcttctacggcccccttgcagcaatgctcttcccagcattacgttgcgggtaaaacggaggtcgtgtacccgacctagcagcccagggatggaaaagtcccggccgtcgctggcaataatagcgggcggacgcatgtcatgagattattggaaaccaccagaatcgaatataaaaggcgaacacctttcccaattttggtttctcctgacccaaagactttaaatttaatttatttgtccctatttcaatcaattgaacaactatcaaaacaca

SEQ ID NO: 368 - DNA, 486 bp, Artificial sequence
  Synthetic sequence
tttttgtagaaatgtcttggtgtcctcgtccaatcaggtagccatctctgaaatatctggctccgttgcaactccgaacgacctgctggcaacgtaaaattctccggggtaaaacttaaatgtggagtaatggaaccagaaacgtctcttcccttctctctccttccaccgcccgttaccgtccctaggaaattttactctgctggagagcttcttctacggcccccttgcagcaatgctctacccagcattacgttgcgggtaaaacggaggtcgtgtacccgacctagcagcccagggatggaaaagtcccggccgtcgctggcaataatagcgggcggacgcatgtcatgagattattggaaaccaccagaatcgaatataaaaggcgaacacctttcccaattttggtttctcctgacccaaagactttaaatttaatttatttgtccctatttcaatcaattgaacaactatcaaaacaca

SEQ ID NO: 369 - DNA, 843 bp, Artificial sequence
  Synthetic sequence
taccaaaaaacctggagaagttcctcagcttgcccgcctcccagcctttgaaagaataggggaagggggtggcgcgtgctgtccccaggcgaccgggctcaggctccgactccccatgccagccgctcccgggtcgtccgtgcggccccttggcgcggcctgggctcctggacctctctggttcccaccaggatccccatccccgagtctatagtggcttgcgtgcccatagtcccgtcccgggaacctttagccatcactgcccccgcgggccacctcggtcccctccccctctcaggcctgggcccacatgcctggtgcgtgcactggggaacaaggcgggcccgcaaaaagaaaaacgaggaggcccggctactcgcgggtttacgggcgcacgtagctcaggcctcctcgcccttgggctgggactgggcgagcagcacgggaggcggggcgcacgtcacccacgccccgccgcccccagtccctataaattgaggctgcgggttcctccggtgctctctgctccgccccgttcgacaggcagccgcttcttctcgtgcagtgctaggtgaccaaggcagaggccgtgggggcttgggggccggcgggaggagggggcgtgctggccggggcttgggcagccccgaggcggtgctgggcccccagagcggagccgccgggcggggtcccgcattgcaggggcgagcagagtacgtgccgtgccctggggtgggaatggaggccggggggaggggcgccgagggctctggccgctgggctttgccgactgccctgatgctcactctcctctccccacagcgcgtccccgagactgccacc

SEQ ID NO: 370 - DNA, 799 bp, Artificial sequence
  Synthetic sequence
atcctcaacttttccacagcctttgcataaaggggagagggtcggcggtgcagctgtggcacacacgcacttctgctcaacccgcccccccccgcccccgttcctgttccttcccaggttctccccattttatcggggcggcaacttttaggtccctgggtcctggaagtccttagtacacactcttcgtccttaagtccatagtctgtattccctcggtcctatcctgtcccccatcaccgggtcacctccccagcgaagcaatctcagttcccctccccctctcagccccgagcccacacgtttggtgcgtgcacatttcaaaaacgaggcgggtccaaagagagggggtggggaggtgccgagtggcccagctactcgcggctttacgggtgcacgtagctcaggcctcagcgcccttgagctgtgactggatggatgagcggggcgggaggcggggcgagcgtcctcggcgctccccaccaccccagttcctataaatacggactgcagccctccccggtgctctctgctcctccctgttctagagacagccgcatctttccgtgcagtgccaggtgaaaaccgcagagtgggccgcaggtggccggggacggtcggaaacggggaaggggggcgctcagcccgggactgcgggcgctggggcgagctccactgcccgagcccgggctccgcattgcagaggctggagggggaagggatggggggcgcggcggggggcacgctgacctctctttcttctctctccctccgcagcctcgctccggagactgccacc

SEQ ID NO: 371 - DNA, 163 bp, Artificial sequence
  Synthetic sequence
ggagacgccttgggctgggactggctgagcctggcgggaggcggggtccgagtcaccgcctgccgccgcgcccccggtttctataaattgagcccgcagcctcccgcttcgctctctgctcctcctgttcgacagtcagccgcatcttcttttgcgtcgccag

SEQ ID NO: 372 - DNA, 185 bp, Artificial sequence
  Synthetic sequence
ggagacggcacgtagctcaggcctcaagaccttgggctgggactggctgagcctggcgggaggcggggtccgagtcaccgcctgccgccgcgcccccggtttctataaattgagcccgcagcctcccgcttcgctctctgctcctcctgttcgacagtcagccgcatcttcttttgcgtcgccag

SEQ ID NO: 373 - DNA, 224 bp, Artificial sequence
  Synthetic sequence
ggagacggggagaaagtagggcccggctactagcggttttacgggcgcacgtagctcaggcctcaagaccttgggctgggactggctgagcctggcgggaggcggggtccgagtcaccgcctgccgccgcgcccccggtttctataaattgagcccgcagcctcccgcttcgctctctgctcctcctgttcgacagtcagccgcatcttcttttgcgtcgccag

SEQ ID NO: 374 - DNA, 275 bp, Artificial sequence
  Synthetic sequence
ggagacgacgctcggtgcgtgcccagttgaaccaggcggctgcggaaaaaaaaaagcggggagaaagtagggcccggctactagcggttttacgggcgcacgtagctcaggcctcaagaccttgggctgggactggctgagcctggcgggaggcggggtccgagtcaccgcctgccgccgcgcccccggtttctataaattgagcccgcagcctcccgcttcgctctctgctcctcctgttcgacagtcagccgcatcttcttttgcgtcgccag

SEQ ID NO: 375 - DNA, 122 bp, Artificial sequence
  Synthetic sequence
ggagacgcgagtcaccgcctgccgccgcgcccccggtttctataaattgagcccgcagcctcccgcttcgctctctgctcctcctgttcgacagtcagccgcatcttcttttgcgtcgccag

SEQ ID NO: 376 - DNA, 167 bp, Artificial sequence
  Synthetic sequence
ggagacgcagctccccccaccatccagttcctataaatacggactgcagccctccctggtgctctctgctcctccctgttctagagacagccgcatcttcttgtgcagtgccaggctctctgctcctcctgttcgacagtcagccgcatcttcttttgcgtcgccag

SEQ ID NO: 377 - DNA, 190 bp, Artificial sequence
  Synthetic sequence
ggagacggcgggaggcggggcgcgcgtcatcagctccccccaccatccagttcctataaatacggactgcagccctccctggtgctctctgctcctccctgttctagagacagccgcatcttcttgtgcagtgccaggctctctgctcctcctgttcgacagtcagccgcatcttcttttgcgtcgccag

SEQ ID NO: 378 - DNA, 211 bp, Artificial sequence
  Synthetic sequence
ggagacgagctgggactggatgagccgagcgggaggcggggcgcgcgtcatcagctccccccaccatccagttcctataaatacggactgcagccctccctggtgctctctgctcctccctgttctagagacagccgcatcttcttgtgcagtgccaggctctctgctcctcctgttcgacagtcagccgcatcttcttttgcgtcgccag

SEQ ID NO: 379 - DNA, 239 bp, Artificial sequence
  Synthetic sequence
ggagacggcacgtagctcaggcctctgcgcccttgagctgggactggatgagccgagcgggaggcggggcgcgcgtcatcagctccccccaccatccagttcctataaatacggactgcagccctccctggtgctctctgctcctccctgttctagagacagccgcatcttcttgtgcagtgccaggctctctgctcctcctgttcgacagtcagccgcatcttcttttgcgtcgccag

SEQ ID NO: 380 - DNA, 278 bp, Artificial sequence
  Synthetic sequence
ggagacggggaatgagagaggcccagctactcgcggctttacgggtgcacgtagctcaggcctctgcgcccttgagctgggactggatgagccgagcgggaggcggggcgcgcgtcatcagctccccccaccatccagttcctataaatacggactgcagccctccctggtgctctctgctcctccctgttctagagacagccgcatcttcttgtgcagtgccaggctctctgctcctcctgttcgacagtcagccgcatcttcttttgcgtcgccag

SEQ ID NO: 381 - DNA, 413 bp, Artificial sequence
  Synthetic sequence
ggagacgtcctatcctgggaaccctcatccggtcacttcctcggcgggacaatctcagctcccctccccctctcaggtcggagcccacacgcttggtgcgtgcacatttcaaaaacgaggcgggtccaaaaagagggagggggggaatgagagaggcccagctactcgcggctttacgggtgcacgtagctcaggcctctgcgcccttgagctgggactggatgagccgagcgggaggcggggcgcgcgtcatcagctccccccaccatccagttcctataaatacggactgcagccctccctggtgctctctgctcctccctgttctagagacagccgcatcttcttgtgcagtgccaggctctctgctcctcctgttcgacagtcagccgcatcttcttttgcgtcgccag

SEQ ID NO: 382 - DNA, 508 bp, Artificial sequence
  Synthetic sequence
tctaccgggtaggggaggcgcttttcccaaggcagtctggagcatgcgctttagcagccccgctgggcacttggcgctacacaagtggcctctggcctcgcacacattccacatccaccggtaggcgccaaccggctccgttctttggtggccccttcgcgccaccttctactcctcccctagtcaggaagttcccccccgccccgcagctcgcgtcgtgcaggacgtgacaaatggaagtagcacgactcactagtctcgtgcagatggacagcaccgctgagcaatggaagcgggtaggcctttggggcagcggccaatagcagctttgctccttcgctttctgggctcagaggctgggaaggggtgggtccgggggcgggctcaggggcgggctcaggggcggggcgggcgcccgaaggtcctccggaggcccggcattctgcacgcttcaaaagcgcacgtctgccgcgctgttctcctcttcctcatctccgggcctttcgtc

SEQ ID NO: 383 - DNA, 460 bp, Artificial sequence
  Synthetic sequence
ctaccgggtaggggaggcgcttttcccaaggcagtctggagcatgcgctttagcagccccgctgggcacttggcgctacacaagtggcctctggcctcgcacacattccacatccaccggtaggcgccaaccggctccgttctttggtggccccttcgcgccaccttctactcctcccctagtcaggaagttcccccccgccccgcagctcgcgtcgtgcaggacgtgacaaatggaagtagcacgactcactagtctcgtgcagatggacagcaccgctgagcaatggaagcgggtaggcctttggggcagcggccaatagcagctttgctccttcgctttctgggctcaggggcggggcgggcgcccgaaggtcctccggaggcccggcattctgcacgcttcaaaagcgcacgtctgccgcgctgttctcctcttcctcatctccgggcctttcgtc

SEQ ID NO: 384 - DNA, 466 bp, Artificial sequence
  Synthetic sequence
cggggttggggttgcgccttttccaaggcagccctgggtttgcgcagggacgcggctgctctgggcgtggttccgggaaacgcagcggcgccgaccctgggcctcgcacattcttcacgtccgttcgcagcgtcacccggatcttcgccgctacccttgtgggccccccggcgacgcttcctcgtccgcccctaagtcgggaaggttccttgcggttcgcggcgtgccggacgtgacaaacggaagccgcacgtctcactagtaccctcgcagacggacagcgccagggagcaatggcagcgcgccgaccgcgatgggctgtggccaatagcggctgctcagcagggcgcgccgagagcagcggccgggaaggggcggtgcgggaggcggggtgtggggcggtagtgtgggccctgttcctgcccgcgcggtgttccgcattctgcaagcctccggagcgcacgtc

SEQ ID NO: 385 - DNA, 466 bp, Artificial sequence; identical to SEQ ID NO: 384
  Synthetic sequence

SEQ ID NO: 386 - DNA, 458 bp, Artificial sequence
  Synthetic sequence
tctaccgggtaggggaggcgcttttcccaaggcagtctggagcatgcgctttagcagccccgctgggcacttggcgctacacaagtggcctctggcctcgcacacattccacatccaccggtaggcgccaaccggctccgttctttggtggccccttcgcgccaccttctactcctcccctagtcaggaagttcccccccgccccgcagctcgcgtcgtgcaggacgtgacaaatggaagtagcacgactcactagtctcgtgcagatggacagcaccgctgagcaatggaagcgggtaggcctttggggcagcggccaatagcagctttgctccttcgctttctgagagcagcggccgggaaggggcggtgcgggaggcggggtgtggggcggtagtgtgggccctgttcctgcccgcgcggtgttccgcattctgcaagcctccggagcgcacgtc

SEQ ID NO: 387 - DNA, 523 bp, Artificial sequence
  Synthetic sequence
cacgggtgggggtgagcgcttttcctaaggcagcctaggactaaagcagcgccacagatactttgggtgtggctcctgaaccgcggctgcagaagctacgggcctctcaaactttccacgtccaagtcgtagcacgacgcagctcccttccgccccacctgcaggtcgctcgatgccgcctctcgctccgcccctagtcaggaaggttcccccgcagctcgcagcgtgccggacgtgacaaatggaagccgcacgtcccaccagtaccctcgcagacggacagcgccttggagcaatggcagcgagccggcccctttgggccagggccaatagcggccgctctgcttggcgcgccctgagccgcggccgggaaggggcggtgcgggaggcggggcgtcggggggcggtgcgggcgcgctcccggtgggcgaggtgctcagcattctgcacgcgtctggacagcgcgtcggtcgcattatccttctctcagtctccaacctctcgccctcgccttattgccacc

SEQ ID NO: 388 - DNA, 527 bp, Artificial sequence
  Synthetic sequence
cacggggttggggttgcgccttttccaaggcagccctgggtttgcgcagggatgcggctgctctgggcgtggttccgggaaacgcagcggcgccgaccttgggtcttgcacattcttcacgtccgttcgcagcgtcacccggatcttcgccgctacccttgtgggccccccggcgacgcttcctgctccgcccctaagtcgggaaggttccttgcggttcgcggcgtgccggacgtgacaaacggaagccgcacctctcactagtaccctcgcagacggacagcgccaaggagcaatggcagcgcgccgaccgcgatgggctgtggccaatagcggctgctcagcagggcgcgccgggagcagcggccgggaaggggcggtgcgggaggcggggtgtggggcggtagtgtggcccctgttcctgcccgcgcggtgttcggcattctgcaagcctccggagcggacgtcagcagtcggctccctcgttgaccgaatcaccgacctctctccccagctgtattgccacc

SEQ ID NO: 389 - DNA, 660 bp, Artificial sequence
  Synthetic sequence
tctaccgggtaggggaggcgcttttcccaaggcagtctggagcatgcgctttagcagccccgctgggcacttggcgctacacaagtggcctctggcctcgcacacattccacatccaccggtaggcgccaaccggctccgttctttggtggccccttcgcgccaccttctactcctcccctagtcaggaagttcccccccgccccgcagctcgcgtcgtgcaggacgtgacaaatggaagtagcacgactcactagtctcgtgcagatggacagcaccgctgagcaatggaagcgggtaggcctttggggcagcggccaatagcagctttgctccttcgctttctgggctcaggggcggggcgggcgcccgaaggtcctccggaggcccggcattctgcacgcttcaaaagcgcacgtctgccgcgctgttctcctcttcctcatctccgggcctttcgtcaagcttggacacaagacaggcttgcgagatatgtttgagaataccactttatcccgcgtcagggagaggcagtgcgtaaaaagacgcggactcatgtgaaatactggtttttagtgcgccagatctctataatctcgcgcaacctattttcccctcgaacactttttaagccgtagataaacaggctgggacacttcac

SEQ ID NO: 390 - DNA, 655 bp, Artificial sequence
  Synthetic sequence
tctaccgggtaggggaggcgcttttcccaaggcagtctggagcatgcgctttagcagccccgctgggcacttggcgctacacaagtggcctctggcctcgcacacattccacatccaccggtaggcgccaaccggctccgttctttggtggccccttcgcgccaccttctactcctcccctagtcaggaagttcccccccgccccgcagctcgcgtcgtgcaggacgtgacaaatggaagtagcacgactcactagtctcgtgcagatggacagcaccgctgagcaatggaagcgggtaggcctttggggcagcggccaatagcagctttgctccttcgctttctgggctcaggggcggggcgggcgcccgaaggtcctccggaggcccggcattctgcacgcttcaaaagcgcacgtctgccgcgctgttctcctcttcctcatctccgggcctttcgtcggacacaagacaggcttgcgccaccatggttgagaataccactttatcccgcgtcagggagaggcagtgcgtaaaaagacgcggaaccatgtgaaatactggtttttagtgcgccagatctctataatctcgcgcaacctattttcccctcgaacactttttaagccgtagataaacaggctgggacacttcac

SEQ ID NO: 391 - DNA, 653 bp, Artificial sequence
  Synthetic sequence
tctaccgggtaggggaggcgcttttcccaaggcagtctggagcatgcgctttagcagccccgctgggcacttggcgctacacaagtggcctctggcctcgcacacattccacatccaccggtaggcgccaaccggctccgttctttggtggccccttcgcgccaccttctactcctcccctagtcaggaagttcccccccgccccgcagctcgcgtcgtgcaggacgtgacaaatggaagtagcacgactcactagtctcgtgcagatggacagcaccgctgagcaatggaagcgggtaggcctttggggcagcggccaatagcagctttgctccttcgctttctgggctcaggggcggggcgggcgcccgaaggtcctccggaggcccggcattctgcacgcttcaaaagcgcacgtctgccgcgctgttctcctcttcctcatctccgggcctttcgtcggacacaagacaggcttgcgccaccatggttgagaataccactttatcccgcgtcagggagaggcagtgcgtaaaaagacgcggaaccatgtgaaatactggtttttagtgcgccagatctctataatctcgcgcaacctattttcccctcgaacactttttaagccgtagataaacaggctgggatttttt

SEQ ID NO: 392 - DNA, 1092 bp, Artificial sequence
  Synthetic sequence
aagtttccagagctttcgaggaaggtttcttcaactcaaattcatccgcctgataattttcttatattttcctaaagaaggaagagaagcgcatagaggagaagggaaataattttttaggagcctttcttacggctatgaggaatttggggctcagttgaaaagcctaaactgcctctcgggaggttgggcgcggcgaactactttcagcggcgcacgcagacggcgtctacgtgaggggtgataagtgacgcaacactcgttgcataaatttgcgctccgccagcccggagcatttaggggcggttggctttgttgggtgagcttgtttgtgtccctgtgggtggacgtggttggtgattggcaggatcctggtatccgctacaggtactggcccacagccgtaaagagctgcgggggcgtgagaggggggaatgggtgaggtcaagctggaggcttcttggggttgggtgggccgctgaggggaggggagggcgaggtgacgcgacacccggcctttctgggagagtgggccttgttgacctaaggggggcgagggcagttggcacgcgcacgcgccgacagaaactaacagacattaaccaacagcgattccgtcgcgtttacttgggaggaaggcggaaaagaggtagtttgtgtggcttctggaaaccctaaatttggaatcccagtatgagaatggtgtcccttcttgtgtttcaatgggatttttacttcgcgagtcttgtgggtttggttttgttttcagtttgcctaacaccgtgcttaggtttgaggcagattggagttcggtcgggggagtttgaatatccggaacagttagtggggaaagctgtggacgcttggtaagagagcgctctggattttccgctgttgacgttgaaaccttgaatgacgaatttcgtattaagtgacttagccttgtaaaattgaggggaggcttgcggaatattaacgtatttaaggcattttgaaggaatagttgctaattttgaagaatattaggtgtaaaagcaagaaatacaatgatcctgaggtgacacgcttatgttttacttttaaactaggtca

SEQ ID NO: 393 - DNA, 215 bp, Artificial sequence
  Synthetic sequence
cagctgcttcatccccgtggcccgttgctcgcgtttgctggcggtgtccccggaagaaatatatttgcatgtctttagttctatgatgacacaaaccccgcccagcgtcttgtcattggcgaaaacacgcagatgcagtcggggcggcgcggtcccaggtccacttcgcatattaaggtgacgcgtgtggcctcgaacacagagcgactctgcag

SEQ ID NO: 394 - DNA, 753 bp, Artificial sequence
  Synthetic sequence
aaatgagtcttcggacctcgcgggggccgcttaagcggtggttagggtttgtctgacgcggggggagggggaaggaacgaaacactctcattcggaggcggctcggggtttggtcttggtggccacgggcacgcagaagagcgccgcgatcctcttaagcacccccccgccctccgtggaggcgggggtttggtcggcgggtggtaactggcgggccgctgactcgggcgggtcgcgcgccccagagtgtgaccttttcggtctgctcgcagacccccgggcggcgccgccgcggcggcgacgggctcgctgggtcctaggctccatggggaccgtatacgtggacaggctctggagcatccgcacgactgcggtgatattaccggagaccttctgcgggacgagccgggtcacgcggctgacgcggagcgtccgttgggcgacaaacaccaggacggggcacaggtacactatcttgtcacccggaggcgcgagggactgcaggagcttcagggagtggcgcagctgcttcatccccgtggcccgttgctcgcgtttgctggcggtgtccccggaagaaatatatttgcatgtctttagttctatgatgacacaaaccccgcccagcgtcttgtcattggcgaattcgaacacgcagatgcagtcggggcggcgcggtcccaggtccacttcgcatattaaggtgacgcgtgtggcctcgaacaccgagcgaccctgcagcgacccgcttaa

SEQ ID NO: 395 - DNA, 270 bp, Artificial sequence
  Synthetic sequence
cagtgtggttttcaagaggaagcaaaaagcctctccacccaggcctggaatgtttccacccaatgtcgagcagtgtggttttgcaagaggaagcaaaaagcctctccacccaggcctggaatgtttccacccaatgtcgagcaaaccccgcccagcgtcttgtcattggcgaattcgaacacgcagatgcagtcggggcggcgcggtcccaggtccacttcgcatattaaggtgacgcgtgtggcctcgaacaccgagcgaccctgcagg

SEQ ID NO: 396 - DNA, 149 bp, Artificial sequence
  Synthetic sequence
tcccgcccctaactccgcccagttccgcccattctccgccccatggctgactaattttttttatttatgcagaggccgaggccgcctcggcctctgagctattccagaagtagtgaggaggcttttttggaggtataggcttttgcaaa

SEQ ID NO: 397 - DNA, 128 bp, Artificial sequence
  Synthetic sequence
gttccgcccattctccgccccatggctgactaattttttttatttatgcagaggccgaggccgcctcggcctctgagctattccagaagtagtgaggaggcttttttggaggcctaggcttttgcaaa

SEQ ID NO: 398 - DNA, 408 bp, Artificial sequence
  Synthetic sequence
cagctgcttcatccccgtggcccgttgctcgcgtttgctggcggtgtccccggaagaaatatatttgcatgtctttagttctatgatgacacaaaccccgcccagcgtcttgtcattggcgaaaacacgcagatgcagtcggggcggcgcggtcccaggtccacttcgcatattaaggtgacgcgtgtggcctcgaacacagagcgactctgcagggacacaagacaggcttgcgagatatgtttgagaataccactttatcccgcgtcagggagaggcagtgcgtaaaaagacgcggactcatgtgaaatactggtttttagtgcgccagatctctataatctcgcgcaacctattttcccctcgaacactttttaagccgtagataaacaggctgggacacttcac

SEQ ID NO: 399 - DNA, 100 bp, Artificial sequence
  Synthetic sequence
ttggcgaaaacacgcagatgcagtcggggcggcgcggtcccaggtccacttcgcatattaaggtgacgcgtgtggcctcgaacacagagcgactctgcag

SEQ ID NO: 400 - DNA, 193 bp, Artificial sequence
  Synthetic sequence
ggacacaagacaggcttgcgagatatgtttgagaataccactttatcccgcgtcagggagaggcagtgcgtaaaaagacgcggactcatgtgaaatactggtttttagtgcgccagatctctataatctcgcgcaacctattttcccctcgaacactttttaagccgtagataaacaggctgggacacttcac

SEQ ID NO: 401 - DNA, 318 bp, Artificial sequence
  Synthetic sequence
ctcactctcttccgcatcgctgtctgcgagggccagctgttgggctcgcggttgaggacaaactcttcgcggtctttccagtactcttggatcggaaacccgtcggcctccgaacggtactccgccaccgagggacctgagcgagtccgcatcgaccggatcggaaaacctctcgagaaaggcgtctaaccagtcacagtcgcaaggtaggctgagcaccgtggcgggcggcagcgggtggcggtcggggttgtttctggcggaggtgctgctgatgatgtaattaaagtaggcggtcttgagagggcggatggtcga

SEQ ID NO: 402 - DNA, 194 bp, Artificial sequence
  Synthetic sequence
ggacacaagacaggcttgcgccaccatggttgagaataccactttatcccgcgtcagggagaggcagtgcgtaaaaagacgcggaaccatgtgaaatactggtttttagtgcgccagatctctataatctcgcgcaacctattttcccctcgaacactttttaagccgtagataaacaggctgggacacttcac

SEQ ID NO: 403 - DNA, 192 bp, Artificial sequence
  Synthetic sequence
ggacacaagacaggcttgcgccaccatggttgagaataccactttatcccgcgtcagggagaggcagtgcgtaaaaagacgcggaaccatgtgaaatactggtttttagtgcgccagatctctataatctcgcgcaacctattttcccctcgaacactttttaagccgtagataaacaggctgggatttttt

SEQ ID NO: 404 - DNA, 300 bp, Artificial sequence
  Synthetic sequence
acgtgacggagcgtgaccgcgcgccgagcgcgcgccaaggtcgggcaggaagagggcctatttcccatgattccttcatatttgcatatacgatacaaggctgttagagagataattagaattaatttgactgtaaacacaaagatattagtacaaaatacgtgacgtagaaagtaataatttcttgggtagtttgcagttttaaaattatgttttaaaatggactatcatatgcttaccgtaacttgaaagtatttcgatttcttggctttatatatcttgtggaaaggacgaaacacc

SEQ ID NO: 405 - DNA, 300 bp, Artificial sequence
  Synthetic sequence
ggaggcctcaccccctacctcggccgctccagggggcgggcctgcatctgggccacctcttttgcatattggcacccacaatccaccgcggctatgaggccagtataaggcggtaaaattacgataagatatgggattttacgtgatcgaagacatcaaagtaagcgtaagcacgaaagttgttctgcaacataccactgtaggaaattatgctaaatatgaaaccgaccataagttatcctaaccaaaagatgatttgattgaagggcttaaaataggtgtgacagtaacccttgagtc

SEQ ID NO: 406 - DNA, 300 bp, Artificial sequence
  Synthetic sequence
aagtccgcggcacgagaaatcaaagccccggggcctgggtcccacgcggggtcccttacccagggtgccccgggcgctcatttgcatgtcccacccaacaggtaaacctgacagatcggtcgcggccaggtacggcctggcggtcagagcaccaaacttacgagccttgtgatgagttccgttacatgaaattctcctaaaggctccaagatggacaggaaagcgctcgattcggttaccgtaaggaaaacaaatgagaaactcccgtgccttataagacctggggacggacttatttgc

SEQ ID NO: 407 - DNA, 300 bp, Artificial sequence
  Synthetic sequence
gctccgcggcacgagaactcaaagccccggggcctgggtcccacgcggggtcccttacccagggtgccccgggcgctcatttgcatgtcccacccaacaggtaaacctgacaggtcatcgcggccaggtacgacctggcggtcagagcaccaaacatacgagccttgtgatgagttccgttgcatgaaattctcccaaaggctccaagatggacaggaaagggcgcggttcggtcaccgtaagtagaataggtgaaagactcccgtgccttataaggcctgtgggtgacttcttctcaac

SEQ ID NO: 408 - DNA, 300 bp, Artificial sequence
  Synthetic sequence
gcctgaggcgtggggccgcctcccaaagacttctgggagggcggtgcggctcaggctctgccccgcctccggggctatttgcatacgaccatttccagtaattcccagcagccaccgtagctatatttggtagaacaacgagcactttctcaactccagtcaataactacgttagttgcattacacattggaatagaggttaaatctctaggtcatttaagagaagtcggcctatgtgtacgctaatataagacatttgttccaggggctttaaatagctggtggtggaactcaatattc

SEQ ID NO: 409 - DNA, 217 bp, Artificial sequence
  Synthetic sequence
cgaacgctgacgtcatcaacccgctccaaggaatcgcgggcccagtgtcactaggcgggaacacccagcgcgcgtgcgccctggcaggaagatggctgtgagggacaggggagtggcgccctgcaatatttgcatgtcgctatgtgttctgggaaatcaccataaacgtgaaatgtctttggatttgggaatcttataagttctgtatgaggaccac

SEQ ID NO: 410 - DNA, 1296 bp, Artificial sequence
  Synthetic sequence
cagcaggtgggccgcctactgcgcacgcgcgggtttgcgggcagccgcctgggctgtgggagcagcccgggcagagctctcctgcctctccaccagcccaccccgccgcctgaccgccccctccccaccccccaccccccacccccggaaaacgcgtcgtcccctgggctgggtggagacccccgtcccgcgaaacaccgggccccgcgcagcgtccgggcctgacaccgctccggcggctcgcctcctatgcgcccccgcgccaccgtcgcccgcccgcccgggcccctgcagccgcccaggtgccagcacggagcgcctggcggcggaacgcagaccccaggcccggcgcacaccggggacgctgagcgttccaggcgggagggaaggcgggcagagatggagagaggaacgggagacctagaggggcggaaggacgggcggagggacgttaggagggagggagggaggcagggaggcagggaggaacggagggaaagacagagcgacgcagggactgggggcgggcgggagggagccggggaacggggggaggaaggcagggaggaaaagcggtcctcggcctccgggagtagcgggacccccgccctccgggaaaacggtcagcgtccggcgcgggctgagggctgggcccacagccgccgcgccggccggcggggcaccacccattcgccccggttccgtggcccagggagtgggcggtttcctccgggacaaaagaccgggactcgggttgccgtcgggtcttcacccgcgcggttcacagaccgcacatccccaggctgagccctgcaacgcggcgcgaggccgacagccccggccacggaggagccacacgcaggacgacggaggcgtgattttggtttccgcgtggctttgccctccgcaaggcggcctgttgctcacgtctctccggcccccgaaaggctggccatgccgactgtttgctcccggagctctgcgggcacccggaaacatgcagggaagggtgcaagcccggcacggtgccttcgctctccttgccaggttccaaaccggccacactgcagactccccacgttgccgcacgcgggaatccatcgtcaggccatcacgccggggaggcatctcctctctggggtctcgctctggtcttctacgtggaaatgaacgagagccacacgcctgcgtgtgcgagaccgtcccggcaacggcgacgcccacaggcattgcctccttcacggagagagggcctggcacactcaagactcccacggaggttcagttccacactcc

SEQ ID NO: 411 - DNA, 1296 bp, Artificial sequence
  Synthetic sequence
caccaggtgggccgcctactgcgcacgcgcgggtttgcgggcagccgcctgggctgtgggagcagcccgggcagagctctcctgcctctccaccagcccaccccgccgcctgaccgccccctccccaccccccaccccccacccccggaaaacgcgtcgtcccctgggctgggtggtgacccccgtcccgcgaaacaccgggccccgcgcagcgtccgggcctgacaccgctccggcggctcgcctcctatgcgcccccgcgccaccgtcgcccgcccgcccgggcccctgcagccgcccaggtgccagcacggagcgcctggcggcggaacgcagaccccaggcccggcgcacaccggggacgctgagcgttccaggcgggagggaaggcgggcagagatggagagaggaacgggagtcctagaggggcggaaggacgggcggagggacgttaggagggagggagggaggcagggaggcagggaggaacggagggaaagacagagcgacgcagggactgggggcgggcgggagggagccggggaacggggggaggaaggcagggaggaaaagcggtcctcggcctccgggagtagcgggacccccgccctccgggaaaacggtcagcgtccggcgcgggctgagggctgggcccacagccgccgcgccggccggcggggcaccacccattcgccccggttccgtggcccagggagtgggcggtttcctccgggacaaaagaccgggactcgggttgccgtcgggtgttcacccgcgcggttcacagaccgcacatccccaggctgagccctgcaacgcggcgcgaggccgacagccccggccacggaggagccacacgcaggacgacggaggcgtgattttggtttccgcgtggctttgccctccgcaaggcggcctgttgctcaagtctctccggcccccgaaaggctggccatgccgactgtttgctcccggagctctgcgggcacccggaaacatgcagggaagggtgcaagcccggcacggtgccttcgctctccttgccaggttccaaaccggccacactgcagactccccacgttgccgcacgcgggaatccatcgtcaggccatcacgccggggaggcatctcctctctggggtgtcgctctggacttctacgtggaaatgaacgagagccacacgcctgcgtgtgccagaccgtcccggcaacggcgacgcccacaggcattgcctccttcacggagagagggcctggcacactcaagactcccacggaggttcagttccacactcc

SEQ ID NO: 412 - DNA, 433 bp, Artificial sequence
  Synthetic sequence
ggcgggagggaaggcgggcagagatggagagaggaacgggagacctagaggggcggaaggacgggcggagggacgttaggagggagggagggaggcagggaggcagggaggaacggagggaaagacagagcgacgcagggactgggggcgggcgggagggagccggggaacggggggaggaaggcagggaggaaaagcggtcctcggcctccgggagtagcgggacccccgccctccgggaaaacggtcagcgtccggcgcgggctgagggctgggcccacagccgccgcgccggccggcggggcaccacccattcgccccggttccgtggcccagggagtgggcggtttcctccgggacaaaagaccgggactcgggttgccgtcgggtcttcacccgcgcggttcacagaccgcacatccccaggctgagc

SEQ ID NO: 413 - DNA, 433 bp, Artificial sequence
  Synthetic sequence
ggcgggagggaaggcgggcagagatggagagaggaacgggagtcctagaggggcggaaggacgggcggagggacgttaggagggagggagggaggcagggaggcagggaggaacggagggaaagacagagcgacgcagggactgggggcgggcgggagggagccggggaacggggggaggaaggcagggaggaaaagcggtcctcggcctccgggagtagcgggacccccgccctccgggaaaacggtcagcgtccggcgcgggctgagggctgggcccacagccgccgcgccggccggcggggcaccacccattcgccccggttccgtggcccagggagtgggcggtttcctccgggacaaaagaccgggactcgggttgccgtcgggtgttcacccgcgcggttcacagaccgcacatccccaggctgagc

SEQ ID NO: 414 - DNA, 65 bp, Artificial sequence
  Synthetic sequence
agaggggcggaagggacgttaggagggaggcagggaggcagggaggcagggaggaacggagggag

SEQ ID NO: 415 - DNA, 1213 bp, Artificial sequence
  Synthetic sequence
gcgagctcacggggacagcccccccccaaagcccccagggatgtaattacgtccctcccccgctagggggcagcagcgagccgcccggggctccgctccggtccggcgctccccccgcatccccgagccggcagcgtgcggggacagcccgggcacggggaaggtggcacgggatcgctttcctctgaacgcttctcgctgctctttgagcctgcagacacctggggggatacggggaaaaagctttaggctgaaagagagatttagaatgacagaatcatagaacggcctgggttgcaaaggagcacagtgctcatccagatccaaccccctgctatgtgcagggtcatcaaccagcagcccaggctgcccagagccacatccagcctggccttgaatgcctgcagggatggggcatccacagcctccttgggcaacctgttcagtgcgtcaccaccctctgggggaaaaactgcctcctcatatccaacccaaacctcccctgtctcagtgtaaagccattcccccttgtcctatcaagggggagtttgctgtgacattgttggtctggggtgacacatgtttgccaattcagtgcatcacggagaggcagatcttggggataaggaagtgcaggacagcatggacgtgggacatgctggtgttgagggctctgggacactctccaagtcacagcgttcagaacagccttaaggataagaagataggatagaaggacaaagagcaagttaaaacccagcatggagaggagcacaaaaaggccacagacactgctggtccctgtgtctgagcctgcatgtttgatggtgtctggatgcaagcagaaggggtggaagtgcttgcctggagagatacagctgggtcagtaggactgggacaggcagctggagaattgccatgtagatgttcatacaatcgtcaaatcatgaaggctggaaaagccctccaagatccccaagaccaaccccaacccacccaccgtgcccactggccatgtccctcagtgccacatccccacagttcttcatcacctccagggacggtgacccccccacctccgtgggcagctgtgccactgcagcaccgctctttggagaaggtaaatcttgctaaatccagcccgaccctcccctggcacaacgtaaggccattatctctcatccaactccaggacggagtcagtgagaatatt

SEQ ID NO: 416 - DNA, 246 bp, Artificial sequence
  Synthetic sequence
gcgagctcacggggacagcccccccccaaagcccccagggatgtaattacgtccctcccccgctagggggcagcagcgagccgcccggggctccgctccggtccggcgctccccccgcatccccgagccggcagcgtgcggggacagcccgggcacggggaaggtggcacgggatcgctttcctctgaacgcttctcgctgctctttgagcctgcagacacctggggggatacggggaaaaagctt

SEQ ID NO: 417 - DNA, 64 bp, Artificial sequence
  Synthetic sequence
atcacgcatgggatacgtcgtggcagtaaaagggcttaaatgccaacgacgcgtcccatacgtt

SEQ ID NO: 418 - DNA, 82 bp, Artificial sequence
  Synthetic sequence
atgacgcatgggatacgtcgtggcagtaaaagggcttaaatgccaacgacgcgtcccatacgttgttggcattttaagtctt

SEQ ID NO: 419 - DNA, 106 bp, Artificial sequence
  Synthetic sequence
cctgggtaaactaaaagtcccctcgaggaaaggcccctaaagtgaaacagtgcaaaacgttcaaaaactgtctggcaatacaagttccactttgggacaaatcggc

SEQ ID NO: 420 - DNA, 105 bp, Artificial sequence
  Synthetic sequence
cctgggtaaactaaaagtcccctcgaggaaaggcccctaaagtgaaacagtgcaaaacgttcaaaaactgtctggcaatacaagttccactttgaccaaaacggc

SEQ ID NO: 421 - DNA, 14 bp, Artificial sequence
  Synthetic sequence
ccytttbmctgcca

SEQ ID NO: 422 - DNA, 14 bp, Artificial sequence
  Synthetic sequence
tggcagkvaaargg

SEQ ID NO: 423 - DNA, 14 bp, Artificial sequence
  Synthetic sequence
ccctttgcctgcca

SEQ ID NO: 424 - DNA, 14 bp, Artificial sequence
  Synthetic sequence
tggcagtgaaaggg

SEQ ID NO: 425 - DNA, 205 bp, Artificial sequence
  Synthetic sequence
cagggtatctcataccctggtaaaattttaaagttgtgtattttataaaattttcgtctgacaacactagcgcgctcagtagctggaggcaggagcgtgcgggaggggatagtggcgtgatcgcagtgtggcacgggacaccggcgagatattcgtgtgcaaacctgtttcgggtatgttataccctgcctcattgttgacgtat

SEQ ID NO: 426 - DNA, 192 bp, Artificial sequence
  Synthetic sequence
tttaagaaaaagattaataaataataataatttcataattaaaaacttctttcattgaatgccattaaataaaccattattttacaaaataagatcaacataattgagtaaataataataagaacaatattatagtacaacaaaatatgggtatgtcataccctgccacattcttgatgtaactttttttca

SEQ ID NO: 427 - DNA, 16 bp, Artificial sequence
  Synthetic sequence
cccggcgagcatgagg

SEQ ID NO: 428 - DNA, 16 bp, Artificial sequence
  Synthetic sequence
cctcatgctcgccggg

SEQ ID NO: 429 - DNA, 296 bp, Artificial sequence
  Synthetic sequence
gtctgcgtaaaattgacgcatgcattcttgaaatattgctctctctttctaaatagcgcgaatccgtcgctgtgcatttaggacatctcagtcgccgcttggagctcccgtgaggcgtgcttgtcaatgcggtaagtgtcactgattttgaactataacgaccgcgtgagtcaaaatgacgcatgattatcttttacgtgacttttaagatttaactcatacgataattatattgttatttcatgttctacttacgtgataacttattatatatatattttcttgttatagatatc

SEQ ID NO: 430 - DNA, 218 bp, Artificial sequence
  Synthetic sequence
tttgttactttatagaagaaattttgagtttttgtttttttttaataaataaataaacataaataaattgtttgttgaatttattattagtatgtaagtgtaaatataataaaacttaatatctattcaaattaataaataaacctcgatatacagaccgataaaacacatgcgtcaattttacgcatgattatctttaacgtacgtcacaatatgat

SEQ ID NO: 431 - DNA, 13 bp, Artificial sequence
  Synthetic sequence
ccctagaaagata

SEQ ID NO: 432 - DNA, 13 bp, Artificial sequence
  Synthetic sequence
tatctttctaggg

SEQ ID NO: 433 - DNA, 15 bp, Artificial sequence
  Synthetic sequence
cacttggattgcggg

SEQ ID NO: 434 - DNA, 15 bp, Artificial sequence
  Synthetic sequence
cccgacaccgtagtg

SEQ ID NO: 435 - DNA, 262 bp, Artificial sequence
  Synthetic sequence
aaacgagttaagtcggctcgcgtgaattgcgcgtactccgcgggagccgtcttaactcggttcatatagatttgcggtggagtgcgggaaacgtgtaaactcgggccgattgtaactgcgtattaccaaatatttgtttccaagcttggtaccgagctcggatcccgtacgctgcaggtcgacggatccccgggttaattaaggcgcgccagatctgtttagcttgcctcgtccccgccgggtcacccggccagcgacatgg

SEQ ID NO: 436 - DNA, 227 bp, Artificial sequence
  Synthetic sequence
tgtcgaagaattcggcggccgcatgcatctagagaattatttatgtactgaatagataaaaaaatgtctgtgattgaataaattttcattttttacacaagaaaccgaaaatttcatttcaatcgaacccatacttcaaaagatataggcattttaaactaactctgattttgcgcgggaaacctaaataattgcccgcgccatcttatattttggcgggaaattca

SEQ ID NO: 437 - DNA, 195 bp, Artificial sequence
  Synthetic sequence
gggtttattagacccaccactttgaaaaacctatgatatttttttaaattgaaggctattgttgacgtgtgttatagtagcttcgcgcaataaaccggcggccattttgacgagcgaacttcagtctcacgtgagcgtgcgtgcgagtagcacgtgtgtaaagtgcgcgcgggcccgtgggaccctaccaggcat

SEQ ID NO: 438 - DNA, 82 bp, Artificial sequence
  Synthetic sequence
cctagcttgttcatttgtgtaaaacatgtattttcaatatcgggtttgacagacccaccaggcatgccgtgtgatttttatg

SEQ ID NO: 439 - DNA, 18 bp, Artificial sequence
  Synthetic sequence
cccttgrcatgcctggta

SEQ ID NO: 440 - DNA, 18 bp, Artificial sequence
  Synthetic sequence
taccaggcatgycaaggg

SEQ ID NO: 441 - DNA, 193 bp, Artificial sequence
  Synthetic sequence
gggcttttcgagcctagcgaaagtgaaattgttcccctcctcccttcccccgcgcgcgacaaacccgtaacttctagtagcttcgatgttagttgcgcctaggccgtcagaagcttcgcacgtgttttcgtgcgcaattcggtaagtaaattcaatttgaaatttgtcgcgggcttcttaggccccacctcag

SEQ ID NO: 442 - DNA, 74 bp, Artificial sequence
  Synthetic sequence
aatattttaaaatatgaacatttatatacacgggccgcggaggcccccacgtcagtacttacgtgaaaataatt

SEQ ID NO: 443 - DNA, 19 bp, Artificial sequence
  Synthetic sequence
cctttarctrctgaggtgg

SEQ ID NO: 444 - DNA, 19 bp, Artificial sequence
  Synthetic sequence
ccacctcagyagytaaagg

SEQ ID NO: 445 - DNA, 196 bp, Artificial sequence
  Synthetic sequence
aagggtcaatttgacccatttcagtttttggtttgaccaaagaactggttatcctttctttttcttcacgaaagttggtgacttttcctcatctagggtcatgaacttgtgtgtaaaatctggatactgtgaagtgtcgtggaatgtctgtgaacagtttgtatacaaagatgatgttgcgggtcattttgaccca

SEQ ID NO: 446 - DNA, 44 bp, Artificial sequence
  Synthetic sequence
atgggtcaaaatgacccgcaacataatcaaggtaattttttttc

SEQ ID NO: 447 - DNA, 15 bp, Artificial sequence
  Synthetic sequence
aacataataygaggg

SEQ ID NO: 448 - DNA, 15 bp, Artificial sequence
  Synthetic sequence
ccctcatattatgtt

SEQ ID NO: 449 - DNA, 15 bp, Artificial sequence
  Synthetic sequence
aacataatacgaggg

SEQ ID NO: 450 - DNA, 303 bp, Artificial sequence
  Synthetic sequence
tacgtaaatttgacgtataccgcggcgaaatatatctgtctctttcacgtttaccgtcggattcccgctaacttcggaaccaactcagtagccattgagaactcccaggacacagttgcgtcatctcggtaagtgccgccattttgttgtaatagacaggttgcacgtcattttgacgtataattgggctttgtgtaacttttgaaattatttataatttttattgatgtgatttatttgagttaatcgtattgtttcgttacatttttcatatgatattaatattttcagattgaatataaa

SEQ ID NO: 451 - DNA, 347 bp, Artificial sequence
  Synthetic sequence
agactgttttttttaaaaggcttataaagtattactattgcgtgatttaattttataaaaatatttaaaaccagttgatttttttaataattacctaattttaagaaaaaatgttagaagcttgatatttttgttgatttttttctaagatttgattaaaaggccataattgtattaataaagagtatttttaacttcaaatttattttatttattaattaaaacttcaattatgataatacatgcaaaaatatagttcatcaacagaaaaatataggaaaactctaatagttttatttttacacgtcatttttacgtatgattgggctttatagctagtcaaatat

SEQ ID NO: 452 - DNA, 16 bp, Artificial sequence
  Synthetic sequence
ccctagaagcccaatc

SEQ ID NO: 453 - DNA, 16 bp, Artificial sequence
  Synthetic sequence
gattgggcttctaggg

SEQ ID NO: 454 - DNA, 304 bp, Artificial sequence
  Synthetic sequence
tacgtaaatttgacgtataccgcggcgaaatatctctgttactttcacgtttaacgtcggatcgccgctaacttctgaaccaactcagtagccattgggacctcgcaggacacagttgcatcatctcggtaagtgccgccattttgttgtaatagagaggttgcacgtcattttgacgtataattgggctttgtgtaacttttgaaattgtttaaatttttttaaatttgtgatttatttgagttaatcgtattgtttcgttacattttacatgtaatattaatattttcaggttgaatacaaa

SEQ ID NO: 455 - DNA, 370 bp, Artificial sequence
  Synthetic sequence
tgtttgtcaagactgtatataaagactgtttttttctaagaaacttataaaatattattacaagttgatttaattttatgaaaaaatttaaaactagttgattttttttataattacataattttaagaaaaagtgttagaggcttgatttttttgtttttttttttctaaggtttgattgaaatgccataatagtattaataaagagtattttttaacttaaaatctattttatttattaattaaaacttcaattatgataactcatgcaaaaatatagttcattaacagaaaaatcttggaaaactctgaagttttatttttacacgtcatttttacgtatgattgggctttataactagttaaatat

SEQ ID NO: 456 - DNA, 16 bp, Artificial sequence
  Synthetic sequence
ccctagaagcccaatc

SEQ ID NO: 457 - DNA, 16 bp, Artificial sequence
  Synthetic sequence
gattgggcttctaggg

SEQ ID NO: 458 - DNA, 227 bp, Artificial sequence
  Synthetic sequence
cagttgaagtcggaagtttacatacacttaagttggagtcattaaaactcgtttttcaactacaccacaaatttcttgttaacaaacaatagttttggcaagtcagttaggacatctactttgtgcatgacacaagtcatttttccaacaattgtttacagacagattatttcacttataattcactgtatcacaattccagtgggtcagaagtttacatacactaa

SEQ ID NO: 459 - DNA, 229 bp, Artificial sequence
  Synthetic sequence
ttgagtgtatgttaacttctgacccactgggaatgtgatgaaagaaataaaagctgaaatgaatcattctctctactattattctgatatttcacattcttaaaataaagtggtgatcctaactgaccttaagacagggaatctttactcggattaaatgtcaggaattgtgaaaaagtgagtttaaatgtatttggctaaggtgtatgtaaacttccgacttcaactg

SEQ ID NO: 460 - DNA, 32 bp, Artificial sequence
  Synthetic sequence
cagttgaagtcggaagtttacatacacttaag

SEQ ID NO: 461 - DNA, 32 bp, Artificial sequence
  Synthetic sequence
ctaaggtgtatgtaaacttccgacttcaactg

SEQ ID NO: 462 - protein, 567 aa, Artificial sequence
  Synthetic sequence
MSQHSDYSDDEFCADKLSNYSCDSDLENASTSDEDSSDDEVMVRPRTLRRRRISSSSSDSESDIEGGREEWSHVDNPPVLEDFLGHQGLNTDAVINNIEDAVKLFIGDDFFEFLVEESNRYYNQNRNNFKLSKKSLKWKDITPQEMKKFLGLIVLMGQVRKDRRDDYWTTEPWTETPYFGKTMTRDRFRQIWKAWHFNNNADIVNESDRLCKVRPVLDYFVPKFINIYKPHQQLSLDEGIVPWRGRLFFRVYNAGKIVKYGILVRLLCESDTGYICNMEIYCGEGKRLLETIQTWSPYTDSWYHIYMDNYYNSVANCEALMKNKFRICGTIRKNRGIPKDFQTISLKKGETKFIRKNDILLQVWQSKKPVYLISSHSAEMEESQNIDRTSKKKIVKPNALIDYNKHMKGVDRADQYLSYYSILRRWKWTKRLAMYMINCALFNSYAVYKSVRQRKMGFKMFLKQTAHWLTDDIPEDMDIVPDLQPVPSTSGMRAKPPTSDPPCRLSMDMRKHTLQAIVGSGKKKNILRRCRVCSVHKLRSETRYMCKFCNIPLHKGACFEKYHTLKN

SEQ ID NO: 463 - protein, 594 aa, Artificial sequence
  Synthetic sequence
MGSSLDDEHILSALLQSDDELVGEDSDSEVSDHVSEDDVQSDTEEAFIDEVHEVQPTSSGSEILDEQNVIEQPGSSLASNRILTLPQRTIRGKNKHCWSTSKSTRRSRVSALNIVRSQRGPTRMCRNIYDPLLCFKLFFTDEIISEIVKWTNAEISLKRRESMTSATFRDTNEDEIYAFFGILVMTAVRKDNHMSTDDLFDRSLSMVYVSVMSRDRFDFLIRCLRMDDKSIRPTLRENDVFTPVRKIWDLFIHQCIQNYTPGAHLTIDEQLLGFRGRCPFRVYIPNKPSKYGIKILMMCDSGTKYMINGMPYLGRGTQTNGVPLGEYYVKELSKPVHGSCRNITCDNWFTSIPLAKNLLQEPYKLTIVGTVRSNKREIPEVLKNSRSRPVGTSMFCFDGPLTLVSYKPKPAKMVYLLSSCDEDASINESTGKPQMVMYYNQTKGGVDTLDQMCSVMTCSRKTNRWPMALLYGMINIACINSFIIYSHNVSSKGEKVQSRKKFMRNLYMSLTSSFMRKRLEAPTLKRYLRDNISNILPKEVPGTSDDSTEEPVMKKRTYCTYCPSKIRRKANASCKKCKKVICREHNIDMCQSCF

SEQ ID NO: 464 - protein, 340 aa, Artificial sequence
  Synthetic sequence
MGKSKEISQDLRKRIVDLHKSGSSLGAISKRLAVPRSSVQTIVRKYKHHGTTQPSYRSGRRRVLSPRDERTLVRKVQINPRTTAKDLVKMLEETGTKVSISTVKRVLYRHNLKGHSARKKPLLQNRHKKARLRFATAHGDKDRTFWRNVLWSDETKIELFGHNDHRYVWRKKGEACKPKNTIPTVKHGGGSIMLWGCFAAGGTGALHKIDGIMDKENYVDILKQHLKTSVRKLKLGRKWVFQHDNDPKHTSKVVAKWLKDNKVKVLEWPSQSPDLNPIENLWAELKKRVRARRPTNLTQLHQLCQEEWAKIHPNYCGKLVEGYPKRLTQVKQFKGNATKY

SEQ ID NO: 465 - protein, 589 aa, Artificial sequence
  Synthetic sequence
MAKRFYSAEEAAAHCMASSSEEFSGSDSEYVPPASESDSSTEESWCSSSTVSALEEPMEVDEDVDDLEDQEAGDRADAAAGGEPAWGPPCNFPPEIPPFTTVPGVKVDTSNFEPINFFQLFMTEAILQDMVLYTNVYAEQYLTQNPLPRYARAHAWHPTDIAEMKRFVGLTLAMGLIKANSLESYWDTTTVLSIPVFSATMSRNRYQLLLRFLHFNNNATAVPPDQPGHDRLHKLRPLIDSLSERFAAVYTPCQNICIDESLLLFKGRLQFRQYIPSKRARYGIKFYKLCESSSGYTSYFLIYEGKDSKLDPPGCPPDLTVSGKIVWELISPLLGQGFHLYVDNFYSSIPLFTALYCLDTPACGTINRNRKGLPRALLDKKLNRGETYALRKNELLAIKFFDKKNVFMLTSIHDESVIREQRVGRPPKNKPLCSKEYSKYMGGVDRTDQLQHYYNATRKTRAWYKKVGIYLIQMALRNSYIVYKAAVPGPKLSYYKYQLQILPALLFGGVEEQTVPEMPPSDNVARLIGKHFIDTLPPTPGKQRPQKGCKVCRKRGIRRDTRYYCPKCPRNPGLCFKPCFEIYHTQLHY

SEQ ID NO: 466 - protein, 589 aa, Artificial sequence
  Synthetic sequence
MAKRFYSAEEAAAHCMAPSSEEFSGSDSEYVPPASESDSSTEESWCSSSTVSALEEPMEVDEDVDDLEDQEAGDRADAAAGGEPAWGPPCNFPPEIPPFTTVPGVKVDTSNFEPINFFQLFMTEAILQDMVLYTNVYAEQYLTQNPLPRYARAHAWHPTDIAEMKRFVGLTLAMGLIKANSLESYWNTTTVLSIPVFSATMSRNRYQLLLRFLHFNNNATAVPPDQPDHDRLHKLRPLIDSLSERFAAVYTPCQNICIDESLLLFKGRLRFRQYIPSKRARYGIKFYKLCESSSGYTSYFLIYEGKDSKLDPPGCPPDLTVSGKIVWELISPLLGQGFHLYVDNFYSSIPLFTALYCLDTPACGTINRTRKGLPRALLDKKLNRGETYALRKNELLAIKFFDKKNVFMLTSIHDESVIREQRVGRPPKNKPLCSKEYSKYMGGVDRTDQLQHYYNATRKTSAWYKKVGIYLIQMALRNSYIVYKAAVPGPKLSYYKYQLQILPALLFGGVEEQTVPEMLPSDNVARLIGKHFIDTLPPTPGKQRPQKGCKVCRKRGIRRDTRYYCPKCPRNPGLCFKPCFEIYHTQLHY

SEQ ID NO: 467 - protein, 589 aa, Artificial sequence
  Synthetic sequence
MAKRFYSAEEAAAHCMASSSEEFSGSDSEYVPPASESDSSTEESWCSSSTVSALEEPMEVDEDVDDLEDQEAGDRADAAAGGEPAWGPPCNFPPEIPPFTTVPGVKVDTSNYEPINFFQLFMTEAILQDMVLYTNVYAEQYLTQNPLPRYARAHAWHPTDIAEMKRFVGLTLAMGLIKANSLESYWDTTTVLSIPVFSATMSRNRYQLLLRFLHFNNNATAVPPDQPGHDRLHKLRPLIDSLSERFAAVYTPCQNICIDESLLLFKGRLQFRQYIPSKRARYGIKFYKLCESSSGYTSYFLIYEGKDSKLDPPGCPPDLTVSGKIVWELISPLLGQGFHLYVDNFYSSIPLFTALYCLDTPACGTINRNRKGLPRALLDKKLNRGETYALRKNELLAIKFFDKKNVFMLTSIHDESVIREQRVGRPPKNKPLCSKEYSKYMGGVDRTDQLQHYYNATRKTRAWYKKVGIYLIQMALRNSYIVYKAAVPGPKLSYYKYQLQILPALLFGGVEEQTVPEMPPSDNVARLIGKHFIDTLPPTPGKQRPQKGCKVCRKRGIRRDTRYYCPKCPRNPGLCFKPCFEIYHTQLHY

SEQ ID NO: 468 - protein, 589 aa, Artificial sequence
  Synthetic sequence
MAKRFYSAEEAAAHCMASSSEEFSGSDSEYVPPASESDSSTEESWCSSSTVSALEEPMEVDEDVDDLEDQEAGDRADAAAGGEPAWGPPCNFPPEIPPFTTVPGVKVDTSNFEPINFFQLFMTEAILQDMVLYTNVYAEQYLTQVPLPRYARAHAWHPTDIAEMKRFVGLTLAMGLIKANSLESYWDTTTVLNIPVFSATMSRNRYQLLLRFLEFNNEATAVPPDQPGHDRLHKLRPLIDSLSERFAAVYTPCQNICIDESLLLFKGRLQFRQYIPSKRARYGIKFYKLCESSSGYTSYFLIYEGKDSKLDPPGCPPDLTVSGKIVWELISPLLGQGFHLYVDNFYSSIPLFTALYCLDTPACGTINRNRKGLPRALLDKKLNRGETYALRKNELLAIKFFDKKNVFMLTSIHDESVIREQRVGRPPKNKPLCSKEYSKYMGGVDRTDQLQHYYNATRKTRAWYKKVGIYLIQMALRNSYIVYKAAVPGPKLSYYKYQLQILPALLFGGVEEQTVPEMPPSDNVARLIGKHFIDTLPPTPGKQRPQKGCKVCRKRGIRRDTRYYCPKCPRNPGLCFKPCFEIYHTQLHY

SEQ ID NO: 469 - protein, 589 aa, Artificial sequence
  Synthetic sequence
MAKRFYSAEEAAAHCMASSQEEFSGSDSEYVPPASESDSSTEESWCSSSTVSALEEPMEVDEDVDDLEDQEAGDRADAAAGGEPAWGPPCNFPPEIPPFTTVPGVKVDTSNFEPINFFQLFMTEAILQDMVLYTNVYAEQYLTQNPLTRYARAHAWHPTDIAEMKRFVGLTLAMGLIKANSLESYWDTTTVLSIPVFGATMSRNRYQLLLRFLHFNNNATAVPPDQPGHDRLHKLRPLIDSLSERFANVYTPCQNICIDESLLLFKGRLQFKQYIPSKRARYGIKFYKLCESSSGYTSYFLIYEGKDSKLDPPGCPPDLTVSGKIVWELISPLLGQGFHLYVDNFYSSIPLFTALYCLNTPACGTINRNRKGLPRALLDKKLNRGETYALRKNELLAIKFFDKKNVFMLTSIHDESVIREQRVGRPPKNKPLCSKEYSKYMGGVDRTDQLQHYYNATRKTRHWYKKVGVYLIQMALRNSYIVYKAAVPGPKLSYYKYQLQILPALLFGGVEEQTVPEMPDSDNVARLIGKHFIDTLPPTPGKQRPQKGCKVCRKRGIRRDTRYYCPKCPRNPGLCRKPCFEIYHTQLHY

SEQ ID NO: 470 - protein, 589 aa, Artificial sequence
  Synthetic sequence
MAKRFYSAEEAAAHCMASSSEEFSGSDSEYVPPASESDSSTEESWCSSSTVSALEEPMEVDEDVDDLEDQEAGDRADAAAGGEPAWGPPCNFPPEIPPFTTVPGVKVDTSNFEPINFFQLFMTEAILQDMVLYTNVYAEQYLTQNPLTRYARAHAWHPTDICEMKRFVGLTLAMGLIKANSLESYWDTTTVLSIPVFGATMSRNRYQLLLRFLHFNNNATAVPPDQPGHDRLHKLRPLIDSLSERFANVYTPCQNICIDESLLLFKGRLQFRQYIPSKRARYGIKFYKLCESSTGYTSYFLIYEGKDSKLDPPGCPPDLTVSGKIVWELISPLLGQGFHLYVDNFYSSIPLFTALYCLNTPACGTINRNRKGLPRALLDKKLNRGETYALRKNELLAIKFFDKKNVFMLTSIHDESVIREQRVGRPPKNKPLCSKEYSKYMGGVDRTDQLQHYYNATRKTRHWYKKVGVYLIQMALRNSYIVYKAAVPGPKLSYYKYQLQILPALLFGGVEEQTVPEMPDSDNVARLIGKHFIDTLPPTPGKQRPQKGCKVCRKRGIRRDTRYYCPKCPRNPGLCRKPCFEIYHTQLHY

SEQ ID NO: 471 - protein, 589 aa, Artificial sequence
  Synthetic sequence
MAKRFYSAEEAAAHCMASSSEQTSGSDSEYVPPASESDSSTEESWCSSSTVSALEEPMEVDEDVDDLEDQEAGDRADAAAGGEPAWGPPCNFPPEIPPFTTVPGVKVDTSNFEPINFFQLFMTEAILQDMVLYTNVYAEQYLTQNPLTRYARAHAWHPTDIAEMKRFVGLTLAMGLIKANSIESYWDTTTVLSIPVFGATMSRNRYQLLLRFLHFNNNATAVPPDQPGHDRLHKLRPLIDSLSERFANVYTPCQNICIDESLLLFKGRLQFRQYIPSKRARYGIKFYKLCESSSGYTSYFLIYEGKDSKLDPPGCPPDLTVSGKIVWELISPLLGQGFHLYVDNFYSSIPLFTALYCLNTPACGTINRNRKGLPRALLDKKLNRGETYALRKNELLAIKFFDKKNVFMLTSIHDESVIREQRVGRKPKNKPLCSKEYSKYMGGVDRTDQLQHYYNATRKTRHWYKKVGIYLIQMALRNSYIVYKAAVPGPKLSYYKYQLQILPALLFGGVEEQTVPEMPPSDNVARLIGKHFIDTLPPTPGKQRPQKGCKVCRKRGIRRDTRYYCPKCPRNPGLCRKPCFEIYHTQLHY

SEQ ID NO: 472 - protein, 589 aa, Artificial sequence
  Synthetic sequence
MAKRFYSAEEAAAHCSASSSEEFSGSDSEYVPPASESDSSTEESWCSSSTVSALEEPMEVDEDVDDLEDQEAGDRADAAAGGEPAWGPPCNFPPEIPPFTTVPGVKVDTSNFEPINFFQLFMTEAILQDMVLYTNVYAEQYLTQNPLTRGARAHAWHPTDIAEMKRFVGLTLAMGLIKANSLESYWDTTTVLSIPVFGATMSRNRYQLLLRFLHFNNNATAVPPDQPGHDRLHKLRPLIDSLSERFANVYTPCQNICIDESLMLFKGRLQFRQYIPSKRARYGIKFYKLCESSTGYTSYFLIYEGKDSKLDPPGCPPDLTVSGKIVWELISPLLGQGFHLYVDNFYSSIPLFTALYCLNTPACGTINRNRKGLPRALLDKKLNRGETYALRKNELLAIKFFDKKNVFMLTSIHDESVIREQRVGRPPKNKPLCSKEYSKYMGGVDRTDQLQHYYNATRKTRHWYKKVGIYLIQMALRNSYIVYKAAVPGPKLSYYKYQLQILPALLFGGVEEQTVPEMPPSDNVARLIGKHFIDTLPPTPGKQRPQKGCKVCRKRGIRRDTRYYCPKCPRNPGLCRKPCFEIYHTQLHY

SEQ ID NO: 473 - protein, 589 aa, Artificial sequence
  Synthetic sequence
MAKRFYSAEEAAAHCSASSSEEFSGSDSEYVPPASESDSSTEESWCSSSTVSALEEPMEVDEDVDDLEDQEAHDRADAAAGGEPAWGPPCNFPPEIPPFTTVPGVKVDTSNFEPINFFQLFMTEAILQDMVLYTNVYAEQYLTQNPLTRGARAHAWHPTDIAEMKRFVGLTLAMGLIKANSIESYWDTTTVLSIPVFGATMSRNRYQLLHRFLHFNNNATAVPPDQPGHDRLHKLRPLIDSLSERFANVYTPCQNICIDESLMLFKGRLQFRQYIPSKRARYGIKFYKLCESSTGYTSYFLIYEGKDSKLDPPGCPPDLTVSGKIVWELISPLLGQGFHLYVDNFYSSIPLFTALYCLNTPACGTINRNRKGLPRALLDKKLNRGETYALRKNELLAIKFFDKKNVFMLTSIHDESVIREQRVGRPPKNKPLCSKEYSKYMGGVDRTDQLQHYYNATRKTRHWYKKVGIYLIQMALRNSYIVYKAAVPGPKLSYYKYQLQILPALLFGGVEEQTVPEMPPSDSVARLIGKHFIDTLPPTPGKQRPQKGCKVCRKRGIRRDTRYYCPKCPRNPGLCRKPCFEIYHTQLHY

SEQ ID NO: 474 - protein, 589 aa, Artificial sequence
  Synthetic sequence
MAKRFYSAEEAAAHCSASSSEEFSGSDSEYVPPASESDSSTEESWCSSSTVSALEEPMEVDEDVDDLEDQEAGDRADAAAGGEPAWGPPCNFPPEIPPFTTVPGVKVDTSNFEPINFFQLFMTEAILQDMVLYTNVYAEQYLTQNPLTRGARAHAWHPTDIAEMKRFVGLTLAMGLIKANSIESYWDTTTVLSIPVFGATMSRNRYQLLLRFLHFNNNATAVPPDQPGHDRLHKLRPLIDSLSERFANVYTPCQNICIDESLMLFKGRLQFRQYIPSKRARYGIKFYKLCESSTGYTSYFLIYEGKDSKLDPPGCPPDLTVSGKIVWELISPLLGQGFHLYVDNFYSSIPLFTALYCLNTPACGTINRNRKGLPRALLDKKLNRGETYALRKNELLAIKFFDKKNVFMLTSIHDESVIREQRVGRPPKNKPLCSKEYSKYMGGVDRTDQLQHYYNATRKTRHWYKKVGIYLIQMALRNSYIVYKAAVPGPKLSYYKYQLQILPALLFGGVEEQTVPEMPDSDNVARLIGKHFIDTLPPTPGKQRPQKGCKVCRKRGIRRDTRYYCPKCPRNPGLCRKPCFEIYHTQLHY

SEQ ID NO: 475 - protein, 589 aa, Artificial sequence
  Synthetic sequence
MAKRFYSAEEAAAHCSASSSEQFSGSDSEYVPPASESDSSTEESWCSSSTVSALEEPMEVDEDVDDLEDQEAGDRADAAAGGEPAWGPPCNFPPEIPPFTTVPGVKVDTSNFEPINFFQLFMTEAILQDMVLYTNVYAEQYLTQNPLTRGARAHAWYPTDIAEMKRFVGLTLAMGLIKANSIESYWDTTTVLSIPVFGATMSRNRYQLLLRFLHFNNNATAVPPDQPGHDRLHKLRPLIDSLSERFANVYTPCQNICIDESLMLFKGRLQFRQYIPSKRARYGIKFYKLCESSTGYTSYFLIYEGKDSKLDPPGCPPDLTVSGKIVWELISPLLGQGFHLYVDNFYSSIPLFTALYCLNTPACGTINRNRKGLPRALLDKKLNRGETYALRKNELLAIKFFDKKNVFMLTSIHDESVIREQRVGRPPKNKPLCSKEYSKYMGGVDRGDQLQHYYNATRKTRHWYKKVGIYLIQMALRNSYIVYKAAVPGPKLSYYKYQLQILPALLFGGVEEQTVPEMPPSDNVARLIGKHFIDTLPPTPGKQRPQKGCKVCRKRGIRRDTRYYCPKCPRNPGLCRKPCFEIYHTQLHY

SEQ ID NO: 476 - protein, 589 aa, Artificial sequence
  Synthetic sequence
MAKRFYSAEEAAAHCSASSSEEFSGSDSEYVPPASESDSSTEESWCSSSTVSALEEPMEVDEDVDDLEDQEAGDRADAAAGGEPAWGPPCNFPPEIPPFTTVPGVKVDTSNFEPINFFQLFMTEAILQDMVLYTNVYAEQYLTQNPLTRGARAHAWHPTDIAEMKRFVGLTLAMGLIKANSIESYWDTTTVLSIPVFGATMSRNRYQLLLRFLHFNNNATAVPPDQPGHDRLHKLRPLIDSLSERFANVYTPCQNICIDESLMLFKGRLQFRQYIPSKRARYGIKFYKLCESSTGYMSYFLIYEGKDSKLDPPGCPPDLTVSGKIVWELISPLLGQGFHLYVDNFYSSIPLFTALYCLNTPACGTINRNRKGLPRALLDKKLNRGETYALRKNELLAIKFFDKKNVFMLTSIHDESVIREQRVGRKPKNKPLCSKEYSKYMGGVDRTDQLQHYYNATRKTRHWYKKVGIYLIQMALRNSYIVYKAAVPGPKLSYYKYQLQILPALLFGGVEEQTVPEMPPSDSVARLIGKHFIDTLPPTPGKQRPQKGCKVCRKRGIRRDTRYYCPKCPRNPGLCRKPCFEIYHTQLHY

SEQ ID NO: 477 - protein, 589 aa, Artificial sequence
  Synthetic sequence
MAKRFYSAEEAAAHCMASSSEEFYGSDSEYVPPASESDSSTEESWCSSSTVSALEEPMEVDEDVDDLEDQEAGDRADAAAGGEPAWGPPCNFPPEIPPFTTVPGVKVDTSNFEPINFFQLFMTEAILQDMVLYTNVYAEQYLTQNPLTRYARAHAWHPTDIAEMKRFVGLTLAMGLIKANSLESYWDTTTVLSIPVFGATMSRNRYQLLLRFLHFNNNATAVPPDQPGHDRLHKLRPLIDSLSERFANVYTPCQNICIDESLLLFKGRLQFKQYIPSKRARYGIKFYKLCESSSGYTSYFLIYEGKDSKLDPPGCPPDLTVSGKIVWELISPLLGQGFHLYVDNFYSSIPLFTALYCLNTPACGTINRNRKGLPRALLDKKLNRGETYALRKNELLAIKFFDKKNVFMLTSIHDESVIREQRVGRPPKNKPLCSKEYSKYMGGVDRTDQLQHYYNATRKTRHWYKKVGIYLIQMALRNSYIVYKAAVPGPKLSYYKYQLQILPALLFGGVEEQTVPEMPDSDNVARLIGKHFIDTLPPTPGKQRPQKGCKVCRKRGIRRDTRYYCPKCPRNPGLCRIPCFEIYHTQLHY

SEQ ID NO: 478 - protein, 589 aa, Artificial sequence
  Synthetic sequence
MAKRFYSAEEAAAHCSASSSEEFSGSDSEYVPPASESDSSTEESWCSSSTVSALEEPMEVDEDVDDLEDQEAGDRADAAAGGEPAWGPPCNFPPEIPPFTTVPGVKVDTSNFEPINFFQLFMTEAILQDMVLYTNVYAEQYLTQNPLTRYARAHAWHPTDICEMKRFVGLTLAMGLIKANSIESYWDTTTVLSIPVFGATMSRNRYQLLLRFLHFNNNATAVPPDQPGHDRLHKLRPLIDSLSERFANVYTPCQNICIDESLMLFKGRLQFRQYIPSKRARYGIKFYKLCESSTGYTSYFLIYEGKDSKLDPPGCPPDLTVSGKIVWELISPLLGQGFHLYVDNFYSSIPLFTALYVLNTPACGTINRNRKGLPRALLDKKLNRGETYALRKNELLAIKFFDKKNVFMLTSIHDESVIREQRVGRPPKNKPLCSKEYSKYMGGVDRTDQLQHYYNATRKTRHWYKKVGIYLIQMALRNSYIVYKAAVPGPKLSYYKYQLQILPALLFGGVEEQTVPEMPPSDNVARLIGKHFIDTLPPTPGKQRPQKGCKVCRKRGIRRDTRYYCPKCPRNPGLCRKPCFEIYHTQLHY

SEQ ID NO: 479 - protein, 589 aa, Artificial sequence
  Synthetic sequence
MAKRFYSAEEAAAHCSASSSEEFSGSDSEYVPPASESDSSTEESWCSSSTVSALEEPMEVDEDVDDLEDQEAGDRADAAAGGEPAWGPPCNFPPEIPPFTTVPGVKVDTSNFEPINFFQLFMTEAILQDMVLYTNVYAEQYLTQNPLTRYARAHAWYPTDIAEMKRFVGLTLAMGLIKANSLESYWDTTTVLSIPVFGATMSRNRYQLLLRFLHFNNNATAVPPDQPGHDRLHKLRPLIDSLSERFANVYTPCQNICIDESLMLFKGRLQFRQYIPSKRARYGIKFYKLCESSTGYTSYFLIYEGKDSKLDPPGCPPDLTVSGKIVWELISPLLGQGFHLYVDNFYSSIPLFTALYCLNTPACGTINRNRKGLPRALLDKKLNRGETYALRKNELLAIKFFDKKNVFMLTSIHDESVIREQRVGRPPKNKPLCSKEYSKYMGGVDRTDQLQHYYNATRKTRHWYKKVGIYLIQMALRNSYIVYKAAVPGPKLSYYKYQLQILPALLFGGVEEQTVPEMPPSDNVARLIGKHFIDTLPPTPGKQRPQKGCKVCRKRGIRRDTRYYCPKCPRNPGLCRKPCFEIYHTQLHY

SEQ ID NO: 480 - protein, 589 aa, Artificial sequence
  Synthetic sequence
MAKRFYSAEEAAAHCSASSSDEFSGSDSEYVPPASESDSSTEESWCSSSTVSALEEPMEVDEDVDDLEDQEAGDRADAAAGGEPAWGPPCNFPPEIPPFTTVPGVKVDTSNFEPINFFQLFMTEAILQDMVLYTNVYAEQYLTQNPLTRGARAHAWYPTDIAEMKRFVGLTLAMGLIKANSLESYWDTTTVLSIPVFGATMSRNRYQLLLRFLHFNNNATAVPPDQPGHDRLHKLRPLIDSLSERFANVYTPCQNICIDESLMLFKGRLQFRQYIPSKRARYGIKFYKLCESSTGYTSYFLIYEGKDSKLDPPGCPPDLTVSGKIVWELISPLLGQGFHLYVDNFYSSIPLFTALYCLNTPACGTINRNRKGLPRALLDKKLNRGETYALRKNELLAIKFFDKKNVFMLTSIHDESVIREQRVGRKPKNKPLCSKEYSKYMGGVDRTDQLQHYYNATRKTRHWYKKVGIYLIQMALRNSYIVYKAAVPGPKLSYYKYQLQILPALLFGGVEEQTVPEMPPSDSVARLIGKHFIDTLPPTPGKQRPQKGCKVCRKRGIRRDTRYYCPKCPRNPGLCRKPCFEIYHTQLHY

SEQ ID NO: 481 - protein, 589 aa, Artificial sequence
  Synthetic sequence
MAKRFYSAEEAAAHCMASSSEEFSGSDSEYVPPASESDSSTEESWCSSSTVSALEEPMEVDEDVDDLEDQEAGDRADAAAGGEPAWGPPCNFPPEIPPFTTVPGVKVDTSNFEPINFFQLFMTEAILQDMVLYTNVYAEQYLTQNPLTRYARAHAWHPTDIAEMKRFVGLTLAMGLIKANSLESYWDTTTVLSIPVFGATMSRNRYQLLLRFLHFNNNATAVPPDQPGHDRLHKLRPLIDSLSERFANVYTPCQNICIDESLLLFKGRLQFRQYIPSKRARYGIKFYKLCESSSGYTSYFLIYEGKDSKLDPPGCPPDLTVSGKIVWELISPLLGQGFHLYVDNFYSSIPLFTALYCLNTPACGTINRNRKGLPRALLDKKLNRGETYALRKNELLAIKFFDKKNVFMLTSIHDESVIREQRVGRPPKNKPLCSKEYSKYMGGVDRTDQLQHYYNATRKTRHWYKKVGIYLIQMALRNSYIVYKAAVPGPKLSYYKYQLQILPALLFGGVEEQTVPEMPPSDNVARLIGKHFIDTLPPTPGKQRPQKGCKVCRKRGIRRDTRYYCPKCPRNPGLCRKPCFEIYHTQLHY

SEQ ID NO: 482 - protein, 589 aa, Artificial sequence
  Synthetic sequence
MAKRFYSAEEAAAHCMASSSEETSGSDSEYVPPASESDSSTEESWCSSSTVSALEEPMEVDEDVDDLEDQEAGDRADAAAGGEPAWGPPCNFPPEIPPFTTVPGVKVDTSNFEPINFFQLFMTEAILQDMVLYTNVYAEQYLTQNPLTRYARAHAWHPTDIAEMKRFVGLTLAMGLIKANSLESYWDTTTVLSIPVFSATMSRNRYQLLLRFLHFNNNATAVPPDQPGHDRLHKLRPLIDSLSERFAAVYTPCQNICIDESLLLFKGRLQFRQYIPSKRARYGIKFYKLCESSSGYTSYFLIYEGKDSKLDPPGCPPDLTVSGKIVWELISPLLGQGFHLYVDNFYSSIPLFTALYCLNTPACGTINRNRKGLPRALLDKKLNRGETYALRKNELLAIKFFDKKNVFMLTSIHDESVIREQRHGRPPKNKPLCSKEYSKYMGGVDRADQLQHYYNATRKTRHWYKKVGIYLIQMALRNSYIVYKAAVPGPKLSYYKYQLQILPALLFGGVEEQTVPEMPPSDNVARLIGKHFIDTLPPTPGKQRPQKGCKVCRKRGIRRDTRYYCPKCPRNPGLCRKPCFEIYHTQLHY

SEQ ID NO: 483 - protein, 589 aa, Artificial sequence
  Synthetic sequence
MAKRFYSAEEAAAHCMASSSEEFSGSDSEYVPPASESDSSTEESWCSSSTVSALEEPMEVDEDVDDLEDQEAGDRADAAAGGEPAWGPPCNFPPEIPPFTTVPGVKVDTSNFEPINFFQLFMTEAILQDMVLYTNVYAEQYLTQNPLTRYARAHAWHPTDIAEMKRFVGLTLAMGLIKANSLESYWDTTTVLSIPVFSATMSRNRYQLLLRFLHFNNEATAVPPDQPGHDRLHKLRPLIDSLSERFAAVYTPCQNICIDESLLLFKGRLQFRQYIPSKRARYGIKFYKLCESSSGYTSYFLIYEGKDSKLDPPGCPPDLTVSGKIVWELISPLLGQGFHLYVDNFYSSIPLFTALYCLNTPACGTINRNRKGLPRALLDKKLNRGETYALRKNELLAIKFFDKKNVFMLTSIHDESVIREQRVGRPPKNKPLCSKEYSKYMGGVDRTDQLQHYYNATRKTRHWYKKVGIYLIQMALRNSYIVYKAAVPGPKLSYYKYQLQILPALLFGGVEEQTVPEMPPSDNVARLIGKHFIDTLPPTPGKQRPQKGCKVCRKRGIRRDTRYYCPKCPRNPGLCRKPCFEIYHTQLHY

SEQ ID NO: 484 - protein, 589 aa, Artificial sequence
  Synthetic sequence
MAKRFYSAEEAAAHCMASSSEEFSGSDSEYVPPASESDSSTEESWCSSSTVSALEEPMEVDEDVDDLEDQEAGDRADAAAGGEPAWGPPCNFPPEIPPFTTVPGVKVDTSNFEPINFFQLFMTEAILQDMVLYTNVYAEQYLTQNPLTRYARAHAWHPTDIAEMKRFVGLTLAMGLIKANSLESYWDTTTVLSIPVFSATMSRNRYQLLLRFLHFNNNATAVPPDQPGHDRLHKLRPLIDSLSERFAAVYTPCQNICIDESLLLFKGRLQFRQYIPSKRARYGIKFYKLCESSSGYTSYFLIYEGKDSKLDPPGCPPDLTVSGKIVWELISPLLGQGFHLYVDNFYSSIPLFTALYCLNTPACGTINRNRKGLPRALLDKKLNRGETYALRKNELLAIKFFDKKNVFMLTSIHDESVIREQRVGRPPKNKPLCSKEYSKYMGGVDRTDQLQHYYNATRKTRAWYKKVGIYLIQMALRNSYIVYKAAVPGPKLSYYKYQLQILPALLFGGVEEQTVPEMPPSDNVARLIGKHFIDTLPPTPGKQRPQKGCKVCRKRGIRRDTRYYCPKCPRNPGLCRKPCFEIYHTQLHY

SEQ ID NO: 485 - protein, 589 aa, Artificial sequence
  Synthetic sequence
MAKRFYSAEEAAAHCMASSSEEFSGSDSEYVPPASESDSSTEESWCSSSTVSALEEPMEVDEDVDDLEDQEAGDRADAAAGGEPAWGPPCNFPPEIPPFTTVPGVKVDTSNFEPINFFQLFMTEAILQDMVLYTNVYAEQYLTQNPLTRYARAHAWHPTDIAEMKRFVGLTLAMGLIKANSLESYWDTTTVLSIPVFSATMSRNRYQLLLRFLHFNNNATAVPPDQPGHDRLHKLRPLIDSLSERFAAVYTPCQNICIDESLLLFKGRLQFRQYIPSKRARYGIKFYKLCESSSGYTSYFLIYEGKDSKLDPPGCPPDLTVSGKIVWELISPLLGQGFHLYVDNFYSSIPLFTALYCLNTPACGTINRNRKGLPRALLDKKLNRGETYALRKNELLAIKFFDKKNVFMLTSIHDESVIREQRVGRPPKNKPLCSKEYSKYMGGVDRTDQLQHYYNATRKTRHWYKKVGIYLIQMALRNSYIVYKAAVPGPKLSYYKYQLQILPALLFGGVEEQTVPEMPPSDNVARLIGKHFIDTLPPTPGKQRPQKGCKVCRKRGIRRDTRYYCPKCPRNPGLCRKPCFEIYHTQLHY

SEQ ID NO: 486 - protein, 589 aa, Artificial sequence
  Synthetic sequence
MAKRFYSAEEAAAHCMASSSEEFSGSDSEYVPPASESDSSTEESWCSSSTVSALEEPMEVDEDVDDLEDQEAGDRADAAAGGEPAWGPPCNFPPEIPPFTTVPGVKVDTSNFEPINFFQLFMTEAILQDMVLYTNVYAEQYLTQNPLPRYARAHAWHPTDIAEMKRFVGLTLAMGLIKANSLESYWDTTTVLKIPVFSATMSRNRYQLLLRFLHFNNNATAVPPDQPGHDRLHKLRPLIDSLSERFAAVYTPCQNICIDESLLLFKGRLQFRQYIPSKRARYGIKFYKLCESSSGYTSYFLIYEGKDSKLDPPGCPPDLTVSGKIVWELISPLLGQGFHLYVDNFYSSIPLFTALYCLNTPACGTINRNRKGLPRALLDKKLNRGETYALRKNELLAIKFFDKKNVFMLTSIHDESVIREQRVGRPPKNKPLCSKEYSKYMGGVDRTDQLQHYYNATRKTRHWYKKVGIYLIQMALRNSYIVYKAAVPGPKLSYYKYQLQILPALLFGGVEEQTVPEMPPSDNVARLIGKHFIDTLPPTPGKQRPQKGCKVCRKRGIRRDTRYYCPKCPRNPGLCFKPCFEIYHTQLHY

SEQ ID NO: 487 - protein, 589 aa, Artificial sequence
  Synthetic sequence
MAKRFYSAEEAAAHCMASSSEEFSGSDSEYVPPASESDSSTEESWCSSSTVSALEEPMEVDEDVDDLEDQEAGDRADAAAGGEPAWGPPCNFPPEIPPFTTVPGVKVDTSNFEPINFFQLFMTEAILQDMVLYTNVYAEQQLTQNPLPRYARAHAWHPTDIAEMKRFVGLTLAMGLIKANSLESYWDTTTVLSIPVFSATMSRNRYQLLLRFLHFNNNATAVPPDQPGHDRLHKLRPLIDSLSERFAAVYTPCQNICIDESLLLFKGRLQFRQYIPSKRARYGIKFYKLCESSSGYTSYFLIYEGKDRKLDPPGCPPDLTVSGKIVWELISPLLGQGFHLYVDNFYSSIPLFTALYCLDTPACGTINRNRKGLPRALLDKKLNRGETYALRKNELLAIKFFDKKNVFMLTSIHDESVIREQRVGRPPKNKPLCSKEYSKYMGGVDRTDQLQHYYNATRKTRAWYKKVGIYLIQMALRNSYIVYKAAVPGPKLSYYKYQLQILPALLFGGVEEQTVPEMPPSDNVARLIGKHFIDTLPPTPGKQRPQKGCKVCRKRGIRRDTRYYCPKCPRNPGLCFKPCFEIYHTQYHY

SEQ ID NO: 488 - protein, 589 aa, Artificial sequence
  Synthetic sequence
MAKRFYSAEEAAAHCMASSSEEPSGSDSEYVPPASESDSSTEESWCSSSTVSALEEPMEVDEDVDDLEDQEAGDRADAAAGGEPAWGPPCNFPPEIPPFTTVPGVKVDTSNFEPINFFQLFMTEAILQDMVLYTNVYAEQYLTQNPLPRYARAHAWHPTDIAEMKRFVGLTLAMGLIKANSLESYWDTTTVLSIPVFSATMSRNRYQLLLRFLHFNNNATAVPPDQPGHDRLHKLRPLIDSLSERFAAVYTPCQNICIDESLLLFKGRLQFRQYIPSKRARYGIKFYKLCESSSGYTSYFLIYEGKDSKLDPPGCPPDLTVSGKIVWELISPLLGQGFHLYVDNFYSSIPLFTHLYCLDTPACGTINRNRKGLPRALLDKKLNRGETYALRKNELLAIKFFDKKNVFMLTSIHDESVIREQRVGRPPKNKPLCSKEYSKYMGGVDRTDQLQHYYNATRKTRAWYKKVGIYLIQMALRNSYIVYKAAVPGPKLSYYKYQLQILPALLFGGVEEQTVPEMPPSDNVARLIGKHFIDTLPPTPGKQRPQKGCKVCRKRGIRRDTRYYCPKCPRNPGLCFKPCFEIYHTQYHY

SEQ ID NO: 489 - protein, 592 aa, Artificial sequence
  Synthetic sequence
MAKRFYSAEEAAAHCMASSQEEFSGSDSEYVPPASESDSSTEESWCSSSTVSALEEPMEVDEDVDDLEDQEAGDRVDAAAGGEPAWGPPCNFPPEIPPFTTVPGVKVDTSNFEPINFFQLFMTEAILQDMVLYTNVYAEQYLTQNPLPRYARAHAWHPTDIAEMKRFVGLTLAMGLIKKNSLESYWDTTTVLSIPVFSATMSRNRYQLLLRFLHFNNNATAVPPDQPGHDRLHKLRPLIDSLSERFAAVYTPCQNICIDESLLLFKGRLQFRQYIPSKRARYGIKFYKLCESSSGYTSYFLIYEGKDSKLDPPGCPPDLTVSGKIVWELISPLLGQGFHLYVDNFYSSIPLFTALYCLDTPACGTINRNRKGLPRALLDKKLNRGETYALRKNELLAIKFFDKKNVFMLTSIHDESVIREQRVGRPPKNKPLCSKEYSKYMGGVDRTDQLQHYYNATRKTRAWYKKVGIYLIQMALRNSYIVYKAAVPGPKLSYYKYQLQILPALLFGGVEEQTVPEMPPSDNVARLIGKHFIDTLPPTPGKQRPQKGCKVCRKRGIRRDTRYYCPKCPRNPGLCFKPCFEIYHTQLHYGRR

SEQ ID NO: 490 - protein, 592 aa, Artificial sequence
  Synthetic sequence
MAKRFYSAEEAAAHCMASSSEEFSGSDSEYVPPASESDSSTEESWCSSSTVSALEEPMEVDEDVDDLEDQEAGDRADAAAGGEPAWGPPCNFPPEIPPFTTVPGVKVDTSNFEPINFFQLFMTEAILQDMVLYTNVYAEQYLTQNKLPRYARAHAWHPTDIAEMKRFVGLTLAMGLIKANSLESYWDTGTVHSIPVFSATMSRNRYQLLLRFLHFNNNATAVPPDQPGHDRLHKLRPLIDSLSERFAAVYTPCQNICIDESLLLFKGRLQFRQYIPSKRARYGIKFYKLCESSSGYTSYFLIYEGKDSKLDPPGCPPDLTVSGKIVWELISPLLGQGFHLYVDNFYSSIPLFTALYCLDTPACGTINRNRKGLPRALLDKKLNRGETYALRKNELLAIKFFDKKNVFMLTSIHDESVIREQRVGRPPKNKPLCSKEYSKYMGGVDRTDQLQHYYNATRKTRAWYKKVGIYLIQMALRNSYIVYKAAVPGPKLSYYKYQLQILPALLFGGVEEQTVPEMPPSDNVARLIGKHFIDTLPPTPGKQRPQKGCKVCRKRGIRRDTRYYCPKCPRNPGLCFKPCFEIYHTQLHYGRR

SEQ ID NO: 491 - protein, 592 aa, Artificial sequence
  Synthetic sequence
MAKRFCSAEEAAAHCMASSSEEFSGSDSEYVPPASESDSSTEESWCSSSTVSALEEPMEVDEDVDDLEDQEAGDRADAAAGGEPAWGPPCNFPPEIPPFTTVPGVKVDTSNFEPINFFQLFMTEAILQDMVLYTNVYAEQYLTQNPLTRYARAHAWHPTDIAEMKRFVGLTLAMGLIKANSLESYWDTTTVLSIPVFSATMSRNRYQLLLRFLHFNNNATAVPPDQPGHDRLHKLRPLIDSLSERFAAVYTPCQNICIDESLLLFKGRLQFRQYIPSKRARYGIKFYKLCESSSGYTSYFLIYEGKDSKLDPPGCPPDLTVSGKIVWELISPLLGQGFHLYVDNFYSSIPLFTALYCLDTPACGTINRNRKGLPRALLDKKLNRGETYALRKNELLAIKFFDKKNVFMLTSIHDESVIREQRVGRPPKNKPLCSKEYSKYMGGVDRTDQLQHYYNATRKTRAWYKKVGIYLIQMALRNSYIVYKAAVPGPKLSYYKYQLQILPALLFGGVEEQTVPEMPPSDNVARLIGKHFIATLPPTPGKQRPQKGCKVCRKRGIRRDTRYYCPKCPRNPGLCFKPCFEIYHTQLHYGRR

SEQ ID NO: 492 - protein, 592 aa, Artificial sequence
  Synthetic sequence
MAKRFYSAEEAAAHCMASSSEEFSGSDSEYVPPASESDSSTEESWCSSSTVSALEEPMEVDEDVDDLEDQEAGDRADAAAGGEPAWGPPCNFPPEIPPFTTVPGVKVDTSNFEPINFFQLFMTEAILQDMVLYTNVYAEQYLTQVPLTRYARAHAWHPTDIAEMKRFVGLTLAMGLIKKNSLESYWDTTTVLSIPVFSATMSRNRYQLLLRFLHFNNNATAVPPDQPGHDRLHKLRPLIDSLSERFAAVYTPCQNICIDESLLLFKGRLQFRQYIPSKRARYGIKFYKLCESSSGYTSYFLIYEGKDSKLDPPGCPPDLTVSGKIVWELISPLLGQGFHLYVDNFYSSIPLFTALYCLDTPACGTINRNRKGLPRALLDKKLNRGETYALRKNELLAIKFFDKKNVFMLTSIHDESVIREQRVGRPPKNKPLCSKEYSKYMGGVDRTDQLQHYYNATRKTRAWYKKVGIYLIQMALRNSYIVYKAAVPGPKLSYYKYQLQILPALLFGGVEEQTVPEMPPSDNVARLIGKHFIDTLPPTPGKQRPQKGCKVCRKRGIRRDTRYYCPKCPRNPGLCFKPCFEIYHTQLHYGRR

SEQ ID NO: 493 - protein, 592 aa, Artificial sequence
  Synthetic sequence
MAKRFYSAEEAAAHCMASSSEEFSGSDQEYVPPASESDSSTEESWCSSSTVSALEEPMEVDEDVDDLEDQEAGDRADAAAGGEPAWGPPCNFPPEIPPFTTVPGVKVDTSNFEPINFFQLFMTEAILQDMVLYTNVYAEQYLTQNKLTRYARAHAWHPTDIAEMKRFVGLTLAMGLIKANSLESYWDTTTVLSIPVFSATMSRNRYQLLLRFLHFNNNATAVPPDQPGHDRLHKLRPLIDSLSERFAAVYTPCQNICIDESLLLFKGRLQFRQYIPSKRARYGIKFYKLCESSSGYTSYFLIYEGKDSKLDPPGCPPDLTVSGKIVWELISPLLGQGFHLYVDNFYSSIPLFTALYCLDTPACGTINRNRKGLPRALLDKKLNRGETYALRKNELLAIKFFDKKNVFMLTSIHDESVIREQRVGRPPKNKPLCSKEYSKYMGGVDRTDQLQHYYNATRKTRAWYKKVGIYLIQMALRNSYIVYKAAVPGPKLSYYKYQLQILPALLFGGVEEQTVPEMPPSDNVARLIGKHFIDTLPPTPGKQRPQKGCKVCRKRGIRRDTRYYCPKCPRNPGLCFKPCFEIYHTQLHYGRR

SEQ ID NO: 494 - protein, 592 aa, Artificial sequence
  Synthetic sequence
MAKRFYSAEEAAAHCMASSSEEFSGSDSEYVPPASESDSSTEESWCSSSTVSALEEPMEVDEDVDDLEDQEAGDRADAAAGGEPAWGPPCNFPPEIPPFTTVPGVKVDTSNFEPINFFQLFMTEAILQDMVLYTNVYAEQYLTQNVLPRYARAHAWHPTDIAEMKRFVGLTLAMGLIKANSLESYWDTTTVLSIPVFSATMSRNRYQLLLRFLHFNNDATAVPPDQPGHDRLHKLRPLIDSLTERFAAVYTPCQNICIDESLLLFKGRLQFRQYIPSKRARYGIKFYKLCESSSGYTSYFLIYEGKDSKLDPPGCPPDLTVSGKIVWELISPLLGQGFHLYVDNFYSSIPLFTALYCLDTPACGTINRNRKGLPRALLDKKLNRGETYALRKNELLAIKFFDKKNVFMLTSIHDESVIREQRVGRPPKNKPLCSKEYSKYMGGVDRTDQLQHYYNATRKTRAWYKKVGIYLIQMALRNSYIVYKAAVPGPKLSYYKYQLQILPALLFGGVEEQTVPEMPPSDNVARLIGKHFIDTLPPTPGKQRPQKGCKVCRKRGIRRDTRYYCPKCPRNPGLCFKPCFEIYHTQLHYGRR

SEQ ID NO: 495 - protein, 592 aa, Artificial sequence
  Synthetic sequence
MAKRFYSAEEAAAHCMASSSEEFSGSDSEYVPPASESDSSTEESWCSSSTVSALEEPMEVDEDVDDLEDQEAGDRADAAPGGEPAWGPPCNFPPEIPPFTTVPGVKVDTSNFEPINFFQLFMTEAILQDMVLYTNVYAEQYLTQVPLPRYARAHAWHPTDIAEMKRFVGLTLAMGLIKANSLESYWDTTTVLSIPVFSATMSRNRYQLLLRFLHFNNEATAVPPDQPGHDRLHKLRPLIDSLSERFAAVYTPCQNICIDESLLLFKGRLQFRQYIPSKRARYGIKFYKLCESSSGYTSYFLIYEGKDSKLDPPGCPPDLTVSGKIVWELISPLLGQGFHLYVDNFYSSIPLFTALYCLDTPACGTINRNRKGLPRALLDKKLNRGETYALRKNELLAIKFFDKKNVFMLTSIHDESVIREQRVGRPPKNKPLCSKEYSKYMGGVDRTDQLQHYYNATRKTRAWYKKVGIYLIQMALRNSYIVYKAAVPGPKLSYYKYQLQILPALLFGGVEEQTVPEMPPSDNVARLIGKHFIDTLPPTPGKQRPQKGCKVCRKRGIRRDTRYYCPKCPRNPGLCFKPCFEIYHTQLHYGRR

SEQ ID NO: 496 - protein, 592 aa, Artificial sequence
  Synthetic sequence
MAKRFYSAEEAAAHCMASSSEEFSGSDSEYVPPASESDSSTEESWCSSSTVSALEEPMEVDEDVDDLEDQEAGDRVDAAAGGEPAWGPPCNFPPEIPPFTTVPGVKVDTSNFEPINFFQLFMTEAILQDMVLYTNVYAEQYLTQNPLPRYARAHAWHPTDIAEMKRFVGLTLAMGLIKANSLESYWDTTTVLSIPVFSATMSRNRYQLLLKFLHFNNEATAVPPDQPGHDRLHKLRPLIDSLSERFAAVYTPCQNICIDESLLLFKGRLQFRQYIPSKRARYGIKFYKLCESSSGYTSYFLIYEGKDSKLDPPGCPPDLTVSGKIVWELISPLLGQGFHLYVDNFYSSIPLFTALYCLDTPACGTINRNRKGLPRALLDKKLNRGETYALRKNELLAIKFFDKKNVFMLTSIHDESVIREQRVGRPPKNKPLCSKEYSKYMGGVDRTDQLQHYYNATRKTRAWYKKVGIYLIQMALRNSYIVYKAAVPGPKLSYYKYQLQILPALLFGGVEEQTVPEMPPSDNVARLIGKHFIDTLPPTPGKQRPQKGCKVCRKRGIRRDTRYYCPKCPRNPGLCFKPCFEIYHTQLHYGRR

SEQ ID NO: 497 - protein, 592 aa, Artificial sequence
  Synthetic sequence
MAKRFYSAEEAAAHCMASSSEEFSGSDSEYVPPASESDSSTEESWCSSSTVSALEEPMEVDEDVDDLEDQEAGDRADAAAGGEPAWGPPCNFPPEIPPFTTVPGVKVDTSNFEPINFFQLFMTEAILQDMVLYTNVYAEQYLTQVPLPRYARAHAWHPTDIAEMKRFVGLTLAMGLIKANSLESYWDTTTVLNIPVFSATMSRNRYQLLLRFLEFNNNATAVPPDQPGHDRLHKLRPLIDSLSERFAAVYTPCQNICIDESLLLFKGRLQFRQYIPSKRARYGIKFYKLCESSSGYTSYFLIYEGKDSKLDPPGCPPDLTVSGKIVWELISPLLGQGFHLYVDNFYSSIPLFTALYCLDTPACGTINRNRKGLPRALLDKKLNRGETYALRKNELLAIKFFDKKNVFMLTSIHDESVIREQRVGRPPKNKPLCSKEYSKYMGGVDRTDQLQHYYNATRKTRAWYKKVGIYLIQMALRNSYIVYKAAVPGPKLSYYKYQLQILPALLFGGVEEQTVPEMPPSDNVARLIGKHFIDTLPPTPGKQRPQKGCKVCRKRGIRRDTRYYCPKCPRNPGLCFKPCFEIYHTQLHYGRR

SEQ ID NO: 498 - protein, 610 aa, Artificial sequence
  Synthetic sequence
MDIERQEERIRAMLEEELSDYSDESSSEDETDHCSEHEVNYDTEEERIDSVDVPSNSRQEEANAIIANESDSDPDDDLPLSLVRQRASASRQVSGPFYTSKDGTKWYKNCQRPNVRLRSENIVTEQAQVKNIARDASTEYECWNIFVTSDMLQEILTHTNSSIRHRQTKTAAENSSAETSFYMQETTLCELKALIALLYLAGLIKSNRQSLKDLWRTDGTGVDIFRTTMSLQRFQFLQNNIRFDDKSTRDERKQTDNMAAFRSIFDQFVQCCQNAYSPSEFLTIDEMLLSFRGRCLFRVYIPNKPAKYGIKILALVDAKNFYVVNLEVYAGKQPSGPYAVSNRPFEVVERLIQPVARSHRNVTFDNWFTGYELMLHLLNEYRLTSVGTVRKNKRQIPESFIRTDRQPNSSVFGFQKDITLVSYAPKKNKVVVVMSTMHHDNSIDESTGEKQKPEMITFYNSTKAGVDVVDELCANYNVSRNSKRWPMTLFYGVLNMAAINACIIYRTNKNVTIKRTEFIRSLGLSMIYEHLHSRNKKKNIPTYLRQRIEKQLGEPSPRHVNVPGRYVRCQDCPYKKDRKTKRSCNACAKPICMEHAKFLCENCAELDSSL

SEQ ID NO: 499 - protein, 610 aa, Artificial sequence
  Synthetic sequence
MDIERQEERIRAMLEEELSDYSDESSSEDETDHCSEHEVNYDTEEERIDSVDVPSNSRQEEANAIIANESDSDPDDDLPLSLVRQRASASRQVSGPFYTSKDGTKWYKNCQRPNVRLRSENIVTEQAQVKNIARDASTEYECWNIFVTSDMLQEILTHTNSSIRWRQTKTAAENSSAETSFYMQETTLCELKALIGLLYIAGLIKSNRQSLKDLWRTDGTGVDIFRTTMSLQRFQFLLNNIRFDDKSTRDERKQTDNMAAFRSIFDQFVQSCQNAYSPSEFLTIDEMLLSFRGRCLFRVYIPNKPAKYGIKILALVDAKNFYVHNLEVYAGKQPSGPYAVSNRPFEVVERLIQPVARSHRNVTFDNWFTGYEVMLHLLNEYRLTSVGTVRKNKRQIPESFIRTDRQPNSSVFGFQKDITLVSYAPKKNKVVVVMSTMHHDNSIDESTGEKQKPEMITFYNSTKAGVDVVDELCANYNVSRNSKRWPMTLFYGVLNMAAINACIIYRTNKNVTIKRTEFIRSLGLSMIYEHLHSRNKKKNIPTYLRQRIEKQLGEPSPRHVNVPGRYVRCQDCPYKKDRKTKRSCNACAKPICMEHAKFLCENCAHLDSSL

SEQ ID NO: 500 - protein, 610 aa, Artificial sequence
  Synthetic sequence
MDIERQEERIRAMLEEELSDYSDESSSEDETDHCSEHEVNYDTEEERIDSVDVPSNSRQEEANAIIANESDSDPDDDLPLSLVRERASASRQVSGPFYTSKDGTKWYKNCQRPNVRLRSENIVTEQAQVKNIARDASTEYECWNIFVTSDMLQEILTHTNSSIRWRQTKTAAENSSAETSFYMQETTLCELKALIGLLYIAGLIKSNRQSLKDLWRTDGTGVDIFRTTMSLQRFQFLQNNIRFDDKSTRDERKQTDNMAAFRSIFDQFVQSCQNAYSPSEFLTIDEMLLSFRGRCLFRVYIPNKPAKYGIKILALVDAKNFYVKNLEVYAGKQPSGPYAVSNRPFEVVERLIQPVARSHRNVTFDNWFTGYELMLHLLNEYRLTSVGTVRKNKRQIPESFIRTDRQPNSSVFGFQKDITLVSYAPKKNKVVVVMSTMHHDNSIDESTGEKQKPEMITFYNSTKAGVDVVDELQANYNVSRNSKRWPMTLFYGVLNMAAINACIIYRTNKNVTIKRTEFIRSLGLSMIKEHLHSRNKKKNIPTYLRQRIEKQLGEPSPRHVNVPGRYVRCQDCPYKKDRKTKRSCNACAKPICMEHAKFLCENCAELDSSI

SEQ ID NO: 501 - protein, 610 aa, Artificial sequence
  Synthetic sequence
MDIERQEERIRAMLEEELSDYSDESSSEDETDHCSEHEVNYDTEEERIDSVDVPSNSRQEEANAIIANESDSDPDDDLPLSLVRQRASASRAVSGPFYTSKDGTKWYKNCQRPNVRLRSENIVTEQAQVKNIARDASTEYECWNIFVTSDMLQEILTHTNSSIRHRQTKTAAENSSAETSFYMQETTLCELKALIGLLYIAGLIKSNRQSLKDLWRTDGTGVDIFRTTMSLQRFQFLLNNIRFDDKSTRDERKQTDNMAAFRSIFDQFVQSCQNAYSPSEFLTIDEMLLSFRGRCLFRVYIPNKPAKYGIKILALVDAKNFYVKNLEVYAGKQPSGPYAVSNRPFEVVERLIQPVARSHRNVTFDNWFTGYELMLHLLNEYRLTSVGTVRKNKRQIPESFIRTDRQPNSSVFGFQKDITLVSYAPKKNKVVVVMSTMHHDNSIDESTGEKQKPEMITFYNSTKAGVDVVDELCANYNVSRNSKRWPMTLFYGVLNMAAINACIIYRCNKNVTIKRTEFIRSLGLSMIYEHLHSRNKKKNIPTYLRQRIEKQLGEPSPRHVNVPGRYVRCQDCPYKKDRKTKRSCNACAKPICMEHAKFLCENCAELDSSL

SEQ ID NO: 502 - protein, 610 aa, Artificial sequence
  Synthetic sequence
MDIERQEERIRAMLEEELSDYSDESSSEDETDHCSEHEVNYDTEEERIDSVDVPSNSRQEEANAIIANESDSDPDDDLPLSLVRQRASASRQMSGPHYTSKDGTKWYKNCQRPNVRLRSENIVTEQAQVKNIARDASTEYECWNIFVTSDMLQEILTHTNSSIRWRQTKTAAENSSASTSFYMQETTLCELKALIGLLYIAGLIKSNRQSLKDLWRTDGTGVDIFRTTMSLQRFQFLQNNIRFDDKSTRDERKQTDNMAAFRSIFDQFVQSCQNAYSPSEFLTIDEMLLSFRGRCLFRVYIPNKPAKYGIKILALVDAKNFYVKNLEVYAGKQPSGPYAVSNRPFEVVERLIQPVARSHRNVTFDNWFTGYELMLHLLNEYRLTSVGTVRKNKRQIPESFIRTDRQPNSSVFGFQKDITLVSYAPKKNKVVVVMSTMHHDNSIDESTGEKQKPEMITFYNSTKAGVDVVDELCANYNVSRNSKRWPMTLFYGVLNMAAINACIIYRTNKNVTIKRTEFIRSLGLSMIYEHLHSRNKKKNIPTYLRQRIEKQLGEPSPRHVNVPGRYVRCQDCPYKKDRKTKRSCNACAKPICMEHAKFLCENCAELDSHL

SEQ ID NO: 503 - protein, 610 aa, Artificial sequence
  Synthetic sequence
MDIERQEERIRAMLEEELSDYSDESSSEDETDHCSEHEVNYDTEEERIDSVDVPSNSRQEEANAIIANESDSDPDDDLPLSLVRQRASASRQVSGPFYTSKDGTKWYKNCQRPNVRLRSENIVTEQAQVKNIARDASTEYECWNIFVTSDMLQEILTHTNSSIRWRQTKTAAENSSASTSFYMQETTLCELKALIGLLYIAGLIKSNRQSLKDLWRTDGTGVDIFRTTMSLQRFQFLLNNIRFDDKSTRDERKQTDNMAAFRSIFDQFVQSCQNAYSPSEFLTIDEMLLSFRGRCLFRVYIPNKPAKYGIKILALVDAKNFYVKNLEVYAGKQPSGPYAVSNRPFEVVERLIQPVARSHRNVTFDNWFTGYELMLHLLNEYRLTSVGTVRKNKRQIPESFIRTDRQPNSSVFGFQKDITLVSYAPKKNKVVVVMSTMHHDNSIDESTGEKQKPEMITFYNSTKAGVDVVDELCANYNVSRNSKRWPMTLFYGVLNMAAINACIIYRTNKNVTIKRTEFIRSLGLSMIYEHLHSRNKKKNIPTYLRQRIAMQLGEPSPRHVNVPGRYVRCQDCPYKKDRKTKRSCNACAKPICMEHAKFLCENCAELDSSL

SEQ ID NO: 504 - protein, 610 aa, Artificial sequence
  Synthetic sequence
MDIERQEERIRAMLEEELSDYSDESSSEDETDHCSEHEVNYDTEEERIDSVDVPSNSRQEEANAIIANESDSDPDDDLPLSLVRQRASASRQVSGPFYTSKDGTKWYKNCQRPNVRLRSENIVTEQAQVKNIARDASTEYECWNIFVTSDMLQEILTHTNSSIRWRQTKTAAENSSAETSFYMQETTLCELKALIGLLYIAGLIKSNRQSLKDLWRTDGTGVDIFRTTMSLQRFQFLLNNIRFDDKSTRDERKQTDNMAAFRSIFDQFVQSCQNAYSPSEFLTIDEMLLSFRGRCLFRVYIPNKPAKYGIKILALVDAKNFYVKNLEVYAGKQPSGPYAVSNRPFEVVERLIQPVARSHRNVTFDNWFTGYELMLHLLNEYRLTSVGTVRKNKTQIPENFIRTDRQPNSSVFGFQKDITLVSYAPKKNKVVVVMSTMHHDNSIDESTGEKQKPEMITFYNSTKAGVDVVDELQANYNVSRNSKRWPMTLFYGVLNMAAINACIIYRTNKNVTIKRTEFIRSLGLSMIYEHLHSRNKKKNIPTYLRQRIEKQLGEPSPRHVNVPGRYVRCQDCPYKKDRKTKRSCNACAKPICMEHAKFLCENCAELDSSL

SEQ ID NO: 505 - protein, 610 aa, Artificial sequence
  Synthetic sequence
MDIERQEERIRAMLEEELSDYSDESSSEDETDHCSEHEVNYDTEEERIDSVDVPSNSRQEEANAIIANESDSDPDDDLPLSLVRQRASASRQVSGPFYTSKDGTKWYKNCQRPNVRLRSENIVTEQAQVKNIARDASTEYECWNIFVTSDMLQEILTHTNSSIRWRQTKTAAENSSAETSFYMQETTLCELKALIGLLYLAGLIKSNRQSLKDLWRTDGTGVDIFRTTMSLQRFQFLQNNIRFDDKSTRDERKQTDNMAAFRSIFDQFVQSCQNAYSPSEFLTIDEMLLSFRGRCLFRVYIPNKPAKYGIKILALVDAKNFYVVNLEVYAGKQPSGPYAVSNRPFEVVERLIQPVARSHRNVTFDNWFTGYELMLHLLNEYRLTSVGTVRKNKRQIPESFIRTDRQPNSSVFGFQKDITLVSYAPKKNKVVVVMSTMHHDNSIDESTGEKQKPEMITFYNSTKAGVDVVDELQANYNVSRNSKRWPMTLFYGVLNMAAINACIIYRTNKNVTIKRTEFIRSLGLSMIKEHLHSRNKKKNIPTYLRQRIEKQLGEPSPRHVNYPGRYVRCQDCPYKKDRKTKRSCNACAKPICMEHAKFLCENCAELDSSL

SEQ ID NO: 506 - protein, 610 aa, Artificial sequence
  Synthetic sequence
MDIERQEERIRAMLEEELSDYSDESSSEDETDHCSEHEVNYDTEEERIDSVDVPSNSRQEEANAIIANESDSDPDDDLPLSLVRQRASASRQVSGPFYTSKDGTKWYKNCQRPNVRLRSENIVTEQAQVKNIARDASTEYECWNIFVTSDMLQEILTHTNSSIRWRQTKTAAENSSAETSFYMQETTLCELKALIGLLYIAGLIKSNRQSLKDLWRTDGTGVDIFRTTMSLQRFQFLQNNIRFDDKSTRDERKQTDNMAAFRSIFDQFVQSCQNAYSPSEFLTIDEMLLSFRGRCLFRVYIPNKPAKYGIKILALVDAKNFYVKNLEVYAGKQPSGPYAVSNRPFEVVERLIQPVARSHRNVTFDNWFTGYELMLHLLNEYRLTSVGTVRKNKRQIPESFIRTDRQPNSSVFGFQKDITLVSYAPKKNKVVVVMSTMHHDNSIDESTGEKQKPEMITFYNSTKAGVDVVDELCANYNVSRNSKRWPMTLFYGVLNMAAINACIIYRTNKNVTIKRTEFIRSLGLSMIYEHLHSRNKKKNIPTYLRQRIEKQLGEPSPRHVNVPGRYVRCQDCPYKKDRKTKRSCNACAKPICMEHAKFLCENCAELDSSL

SEQ ID NO: 507 - protein, 610 aa, Artificial sequence
  Synthetic sequence
MDIERQEERIRAMLEEELSDYSDESSSEDETDHCSEHEVNYDTEEERIDSVDVPSNSRQEEANAIIANESDSDPDDDLPLSLVRQRASASRQVSGPFYTSKDGTKWYKNCQRPNVRLRSENIVTEQAQVKNIARDASTEYECWNIFVTSDMLQEILTHTNSSIRWRQTKTAAENSSAETSFYMQETTLCELKALIGLLYLAGLIKSNRQSLKDLWRTDGTGVDIFRTTMSLQRFQFLQNNIRFDDKSTRDERKQTDNMAAFRSIFDQFVQSCQNAYSPSEFLTIDEMLLSFRGRCLFRVYIPNKPAKYGIKILALVDAKNFYVVNLEVYAGKQPSGPYAVSNRPFEVVERLIQPVARSHRNVTFDNWFTGYELMLHLLNEYRLTSVGTVRKNKRQIPESFIRTDRQPNSSVFGFQKDITLVSYAPKKNKVVVVMSTMHHDNSIDESTGEKQKPEMITFYNSTKAGVDVVDELCANYNVSRNSKRWPMTLFYGVLNMAAINACIIYRTNKNVTIKRTEFIRSLGLSMIKEHLHSRNKKKNIPTYLRQRIEKQLGEPSPRHVNYPGRYVRCQDCPYKKDRKTKRSCNACAKPICMEHAKFLCENCAELHSSL

SEQ ID NO: 508 - protein, 610 aa, Artificial sequence
  Synthetic sequence
MDIERQEERIRAMLEEELSDYSDESSSEDETDHCSEHEVNYDTEEERIDSVDVPSNSRQEEANAIIANESDSDPDDDLPLSLVRQRASASRQVSGPFYTSKDGTKWYKNCQRPNVRLRSENIVTEQAQVKNIARDASTEYECWNIFVTSDMLQEILTHTNSSIRHRQTKTAAENSSAETSFYMQETTLCELKALIGLLYLAGLIKSNRQSLKDLWRTDGTGVDIFRTTMSLQRFQFLQNNIRFDDKSTRDERKQTDNMAAFRSIFDQFVQSCQNAYSPSEFLTIDEMLLSFRGRCLFRVYIPNKPAKYGIKILALVDAKNFYVKNLEVYAGKQPSGPYAVSNRPFEVVERLIQPVARSHRNVTFDNWFTGYELMLHLLNEYRLTSVGTVRKNKRQIPESFIRTSRQPNSSVFGFQKDITLVSYAPKKNKVVVVMSTMHHDNSIDESTGEKQKPEMITFYNSTKAGVDVVDELCANYNVSRNSKRWPMTLFYGVLNMAAINACIIYRTNKNVTIKRTEFIRSLGLSMIYEHLHSRNKKKNIPTYLRQRIEKQLGEPSPRHVNVPGRYVRCQDCPYKKDRKTKRSCNACAKPICMEHAKFLCENCAELDSSL

SEQ ID NO: 509 - protein, 610 aa, Artificial sequence
  Synthetic sequence
MDIERQEERIRAMLEEELSDYSDESSSEDETDHCSEHEVNYDTEEERIDSVDVPSNSRQEEANAIIANESDSDPDDDLPLSLVRQRASASRQVSGPFYTSKDGTKWYKNCQRPNVRLRSENIVTEQAQVKNIARDASTEYECWNIFVTSDMLQEILTHTNSSIRHRQTKTAAENSSAETSFYMQETTLCELKALIGLLYIAGLIKSNRQSLKDLWRTDGTGVDIFRTTMSLQRFQFLQNNIRFDDKSTRDERKQTDNMAAFRSIFDQFVQSCQNAYSPSEFLTIDEMLLSFRGRCLFRVYIPNKPAKYGIKILALVDAKNFYVKNLEVYAGKQPSGPYAVSNRPFEVVERLIQPVARSHRNVTFDNWFTGYELMLHLLNEYRLTSVGTVRKNKRQIPESFIRTDRQPNSSVFGFQKDITLVSYAPKKNKVVVVMSTMHHDNSIDESTGEKQKPEMITFYNSTKAGVDVVDELCANYNVSRNSKRWPMTLFYGVLNMAAINACIIYRTNKNVTIKRTEFIRSLGLSMIYEHLHSRNKKKNIPTYLRQRIEKQLGEPSPRHVNVPGRYVRCQDCPYKKDRKTKRSCNACAKPICMEHAKFLCENCAELDSSL

SEQ ID NO: 510 - protein, 610 aa, Artificial sequence
  Synthetic sequence
MDIERQEERIRAMLEEELSDYSDESSSEDETDHCSEHEVNYDTEEERIDSVDVPSNSRQEEANAIIANESDSDPDDDLPLSLVRQRASASRQVSGPFYTSKDGTKWYKNCQRPNVRLRSENIVTEQAQVKNIARDASTEYECWNIFVTSDMLQEILTHTNSSIRHRQTKTAAENSSAETSFYMQETTLCELKALIGLLYIAGLIKSNRQSLKDLYRTDGTGVDIFRTTMSLQRFQFLQNNIRFDDKSTRDERKQTDNMAAFRSIFDQFVQSCQNAYSPSEFLTIDEMLLSFRGRCLFRVYIPNKPAKYGIKILALVDAKNFYVVNLEVYAGKQPSGPYAVSNRPFEVVERLIQPVARSHRNVTFDNWFTGYELMLHLLNEYRLTSVGTVRKNKRQIPESFIRTDRQPNSSVFGFQKDITLVSYAPKKNKVVVVMSTMHHDNSIDESTGEKQKPEMITFYNSTKAGVDVVDELQANYNVSRNSKRWPMTLFYGVLNMAAINACIIYRTNKNVTIKRTEFIRSLGLSMIYEHLHSRNKKKNIPTYLRQRIEKQLGEPSPRHVNYPGRYVRCQDCPYKKDRKTKRSCNACAKPICMEHAKFLCENCAELDSSL

SEQ ID NO: 511 - protein, 610 aa, Artificial sequence
  Synthetic sequence
MDIERQEERIRAMLEEELSDYSDESSSEDETDHCSEHEVNYDTEEERIDSVDVPSNSRQEEANAIIANESDSDPDDDLPLSLVRQRASASRQVSGPFYTSKDGTKWYKNCQRPNVRLRSENIVTEQAQVKNIARDASTEYECWNIFVTSDMLQEILTHTNSSIRHRQTKTAAENSSAETSFYMQETTLCELKALIALLYIAGLIKSNRQSLKDLWRKDGTGVDIFRTTMSLQRFQFLLNNIRFDDISTRDERKQTDNMAAFRSIFDQFVQCCQNAYSPSEFLTIDEMLLSFRGRCLFRVYIPNKPAKYGIKILALVDAKNFYVHNLEVYAGKQPSGPYAVSNRPFEVVERLIQPVARSHRNVTFDNWFTGYELMLHLLNEYRLTSVGTVRKNKRQIPESFIRTDRQPNSSVFGFQKDITLVSYAPKKNKVVVVMSTMHHDNSIDESTGEKQKPEMITFYNSTKAGVDVVDELCANYNVSRNSKKWPMTLFYGVLNMAAINACIIYRTNKNVTIKRTEFIRSLGLSMIYEHLHSRNKKKNIPTYLRQRIEKQLGEPSPRHVNVPGRYVRCQDCPYKKDRKTKRSCNACAKPICMEHAKFLCENCAELDSSL

SEQ ID NO: 512 - protein, 610 aa, Artificial sequence
  Synthetic sequence
MDIERQEERIRAMLEEELSDYSDESSSEDETDHCSEHEVNYDTEEERIDSVDVPSNSRQEEANAIIANESDSDPDDDLPLSLVRQRASASRQVSGPFYTSKDGTKWYKNCQRPNVRLRSENIVTEQAQVKNIARDASTEYECWNIFVTSDMLQEILTHTNSSIRHRQTKTAAENSSAETSFYMQETTLCELKALIALLYIAGLIKSNRQSLKDLWRTDGTGVDIFRTTMSLQRFQFLINNIRFDDKSTRDERKQTDNMAAFRSIFDQFVQCCQNAYSPSEFLTIDEMLLSFRGRCLFRVYIPNKPAKYGIKILALVDAKNWYVVNLEVYAGKQPSGPYAVSNRPFEVVERLIQPVARSHRNVTFDNWFTGYELMLHLLNEYRLTSVGTVRKNKRQIPESFIRTDRQPNSSVFGFQKDITLVSYAPKKNKVVVVMSTMHHDNSIDESTGEKQKPEMITFYNSTKAGVDVVDELCANYNVSRNSKRWPMTLFYGVLNMAAINACIIYRTNKNVTIKRTEFIRSLGLSMIYEHLHSRNKKKNIPTYLRQRIEKQLGEPSPRHVNVPGRYVRCQDCPYKKDRKTKRSCNACAKPICMEHAKFLCENCAELDSSL

SEQ ID NO: 513 - protein, 610 aa, Artificial sequence
  Synthetic sequence
MDIERQEERIRAMLEEELSDYSDESSSEDETDHCSEHEVNYDTEEERIDSVDVPSNSRQEEANAIIANESDSDPDDDLPLSLVRQRASASRQVSGPFYTSKDGTKWYKNCQRPNVRLRSENIVTEQAQVKNIARDASTEYECWNIFVTSDMLQEILTHTNSSIRHRQTKTAAENSSAETSFYMQETTLCELKALIALLYLAGLIKSNRQSAKDLWRTDGTGVDIFRTTMSLQRFYFLQNNIRFDDKSTRDERKQTDNMAAFRSIFDQFVQCCQNAYSPSEFLTIDEMLLSFRGRCLFRVYIPNKPAKYGIKILALVDAKNFYVKNLEVYAGKQPSGPYAVSNRPFEVVERLIQPVARSHRNVTFDNWFTGYELMLHLLNEYRLTSVGTVRKNKRQIPESFIRTDRQPNSSVFGFQKDITLVSYAPKKNKVVVVMSTMHHDNSIDESTGEKQKPEMITFYNSTKAGVDVVDELCANYNVSRNSKRWPMTLFYGVLNMAAINACIIYRTNKNVTIKRTEFIRSLGLSMIYEHLHSRNKKKNIPTYLRQRIEKQLGEPSPRHVNVPGRYVRCQDCPYKKDRKTKRSCNACAKPICMEHAKFLCENCAELDSSL

SEQ ID NO: 514 - protein, 610 aa, Artificial sequence
  Synthetic sequence
MDIERQEERIRAMLEEELSDYSDESSSEDETDHCSEHEVNYDTEEERIDSVDVPSNSRQEEANAIIANESDSDPDDDLPLSLVRQRASASRQVSGPFYTSKDGTKWYKNCQRPNVRLRSENIVTEQAQVKNIARDASTEYECWNIFVTSDMLQEILTHTNSSIRHRQTKTAAENSSAETSFYMQETTLPELKALIALLYLAGLIKSNRQSLKDLWRTDGTGVDVFRTTMSLQRFQFLQNNIRFDDKSTRDERKQTDNMAAFRSIFDQFVQCCQNAYSPSEFLTIDEMLLSFRGRCLFRVYIPNKPAKYGIKILALVDAKNFYVVNLEVYVGKQPSGPYAVSNRPFEVVERLIQPVARSHRNVTFDNWFTGYELMLHLLNEYRLTSVGTVRKNKRQIPESFIRTDRQPNSSVFGFQKDITLVSYAPKKNKVVVVMSTMHHDNSIDESTGEKQKPEMITFYNSTKAGVDVVDELCANYNVSRNSKRWPMTLFYGVLNMAAINACIIYRTNKNVTIKRTEFIRSLGLSMIYEHLHSRNKKKNIPTYLRQRIEKQLGEPSPRHVNVPGRYVRCQDCPYKKDRKTKRSCNACAKPICMEHAKFLCENCAELDSSL

SEQ ID NO: 515 - protein, 610 aa, Artificial sequence
  Synthetic sequence
MDIERQEERIRAMLEEELSDYSDESSSEDETDHCSEHEVNYDTEEERIDSVDVPSNSRQEEANAIIANESDSDPDDDLPLSLVRQRASASRQVSGPFYTSKDGTKWYKNCQRPNVRLRSENIVTEQAQVKNIARDASTEYECWNIFVTSDMLQEILTHTNSSIRERQTKTAAENSSAETSFYMQETTLCELKALIALLYLAGLIKSNRQSLKDLWRTDGTGVDIFRTTMSLQRFQFLQNNIRFDDKSTRDERKQTDNMAAFRSIFDQFVQCCQNAYSPSEFLTIDEMLLSFRGRCLFRVYIPNKPAKYGIKILALVDAKNFYVKNLEVYVGKQPSGPYAVSNRPFEVVERLIQPVARSHRNVTFDNWFTGYELMLHLLNEYRLTSVGTVRKNKRQIPESFIRTDRQPNSSVFGFQKDITLVSYAPKKNKVVVVMSTMHHDNSIDESTGEKQKPEMITFYNSTKAGVDVVDELCANYNVSRNSKRWPMTLFYGVLNMAAINACIIYRTNKNVTIKRTEFIRSLGLSMIYEHLHSRNKKKNIPTYLRQRIEKQLGEPSPRHVNVPGRYVRCQDCPYKKDRKTKRSCNACAKPICMEHAKFLCENCAELDSSL

SEQ ID NO: 516 - protein, 610 aa, Artificial sequence
  Synthetic sequence
MDIERQEERIRAMLEEELSDYSDESSSEDETDHCSEHEVNYDTEEERIDSVDVPSNSRQEEANAIIANESDSDPDDDLPLSLVRQRASASRQVSGPFYTSKDGTKWYKNCQRPNVRLRSENIVTEQAQVKNIARDASTEYECWNIFVTSDMLQEILTHTNSSIRHRQTKTAAENSSAETSFYMQETTLCELKALIALLYLAGLIKSNRQSLKDLWRTDGTGVDIFRTTMSLQRFQFLQNNIRFDDISTRDERKQTDNMAAFRSIFDQFVQCCQNAYSPSEFLTIDEMLLSFRGRCLFRVYIPNKPAKYGIKILALVDAKNDYVVNLEVYAGKQPSGPYAVSNRPFEVVERLIQPVARSHRNVTFDNWFTGYELMLHLLNEYRLTSVGTVRKNKRQIPESFIRTDRQPNSSVFGFQKDITLVSYAPKKNKVVVVMSTMHHDNSIDESTGEKQKPEMITFYNSTKAGVDVVDELCANYNVSRNSKRWPMTLFYGVLNMAAINACIIYRTNKNVTIKRTEFIRSLGLSMIYEHLHSRNKKKNIPTYLRQRIEKQLGEPSPRHVNYPGRYVRCQDCPYKKDRKTKRSCNACAKPICMEHAKFLCENCAELDSSL

SEQ ID NO: 517 - protein, 610 aa, Artificial sequence
  Synthetic sequence
MDIERQEERIRAMLEEELSDYSDESSSEDETDHCSEHEVNYDTEEERIDSVDVPSNSRQEEANAIIANESDSDPDDDLPLSLVRQRASASRQVSGPFYTSKDGTKWYKNCQRPNVRLRSENIVTEQAQVKNIARDASTEYECWNIFVTSDMLQEILTHTNSSIRHRQTKTAAENSSAETSFYMQETTLCELKALIGLLYLAGLIKSNRQSLKDLYRTDGTGVDIFRTTMSLQRFGFLQNNIRFDDKSTRDERKQTDNMAAFRSIFDQFVQCCQNAYSPSEFLTIDEMLLSFRGRCLFRVYIPNKPAKYGIKILALVDAKNFYVVNLEVYAGKQPSGPYAVSNRPFEVVERLIQPVARSHRNVTFDNWFTGYELMLHLLNEYRLTSVGTVRKNKRQIPESFIRTDRQPNSSVFGFQKDITLVSYAPKKNKVVVVMSTMHHDNSIDESTGEKQKPEMITFYNSTKAGVDVVDELCANYNVSRNSKRWPMTLFYGVLNMAAINACIIYRTNKNVTIKRTEFIRSLGLSMIYEHLHSRNKKKNIPTYLRQRIEKQLGEPSPRHVNVPGRYVRCQDCPYKKDRKTKRSCNACAKPICMEHAKFLCENCAELDSSL

SEQ ID NO: 518 - protein, 610 aa, Artificial sequence
  Synthetic sequence
MDIERQEERIRAMLEEELSDYSDESSSEDETDHCSEHEVNYDTEEERIDSVDVPSNSRQEEANAIIANESDSDPDDDLPLSLVRQRASASRQVSGPFYTSKDGTKWYKNCQRPNVRLRSENIVTEQAQVKNIARDASTEYECWNIFVTSDMLQEILTHTNSSIRHRQTKTAAENSSAETSFYMQETTLCELKALIGLLYLAGLIKSNRQSLKDLWRTDGTGVDIFRTTMSLQRFQFLQNNIRFDDKSTRDERKQTDNMAAFRSIFDQFVQCCQNAYSPSEFLTIDEMLLSFRGRCLFRVYIPNKPAKYGIKILALVDAKNFYVVNLEVYAGKQPSGPYAVSNRPFEVVERLIQPVARSHRNVTFDNWFTGYELMLHLLNEYRLTSVGTVRKNKRQIPESFIRTDRQPNSSVFGFQKDITLVSYAPKKNKVVVVMSTMHHDNSIDESTGEKQKPEMITFYNSTKAGVDVVDELCANYNVSRNSKRWPMTLFYGVLNMAAINACIIYRTNKNVTIKRTEFIRSLGLSMIYEHLHSRNKKKNIPTILRQRIEKQLGEPSPRHVNVPGRYVRCQDCPYKKDRKTKRSCNACAKPICMEHAKFLCVNCAELDSSL

SEQ ID NO: 519 - protein, 610 aa, Artificial sequence
  Synthetic sequence
MDIERQEERIRAMLEEELSDYSDESSSEDETDHCSEHEVNYDTEEERIDSVDVPSNSRQEEANAIIANESDSDPDDDLPLSLVRQRASASRQVSGPFYTSKDGTKWYKNCQRPNVRLRSENIVTEQAQVKNIARDASTEYECWNIFVTSDMLQEILTHTNSSIRHRQTKTAAENSSAETSFYMQETTLCELKALIGLLYLAGLIKSNRQSLKDLWRTDGTGVDIFRTTMSLQRFQFLQNNIRFDDKSTRDERKQTDNMAAFRSIFDQFVQSCQNAYSPSEFLTIDEMLLSFRGRCLFRVYIPNKPAKYGIKILALVDAKNFYVVNLEVYAGKQPSGPYAVSNRPFEVVERLIQPVARSHRNVTFDNWFTGYELMLHLLNEYRLTSVGTVRKNKRQIPESFIRTDRQPNSSVFGFQKDITLVSYAPKKNKVVVVMSTMHHDNSIDESTGEKQKPEMITFYNSTKAGVDVVDELCANYNVSRNSKRWPMTLFYGVLNMAAINACIIYRTNKNVTIKRTEFIRSLGLSMIYEHLHSRNKKKNIPTYLRQRIEKQLGEPSPRHVNYPGRYVRCQDCPYKKDRKTKRSCNACAKPICMEHAKFLCENCAELDSSL

SEQ ID NO: 520 - protein, 610 aa, Artificial sequence
  Synthetic sequence
MDIERQEERIRAMLEEELSDYSDESSSEDETDHCSEHEVNYDTEEERIDSVDVPSNSRQEEANAIIANESDSDPDDDLPLSLVRQRASASRQVSGPFYTSKDGTKWYKNCQRPNVRLRSENIVTEQAQVKNIARDASTEYECWNIFVTSDMLQEILTHTNSSIRHRQTKTAAENSSAETSFYMQETTLCELKALIALLYLAGLIKSNRQSLKDLWRTDGTGVDIFRTTMSLQRFQFLQNNIRFDDKSTRDERKQTDNMAAFRSIFDQFVQCCQNAYSPSEFLTIDEMLLSFRGRCLFRVYIPNKPAKYGIKILALVDAKNFYVVNLEVYAGKQPSGPYAVSNRPFEVVERLIQPVARSHRNVTFDNWFTGYECMLHLLNEYRLTSVGTVRKNKRQIPESFIRTDRQPNSSVFGFQKDITLVSYAPKKNKVVVVMSTMHHDNSIDESTGEKQKPEMITFYNSTKAGVDVVDELCANYNVSRNSKRWPMTLFYGVLNMAAINACIIYRTNKNVTIKRTEFIRSLGLSMIYEHLHSRNKKKNIPTYLRQRIEMQLGEPSPRHVNVPGRYVRCQDCPYKKDRKTKRSCNACAKPICMEHAKFLCENCAELKSSL

SEQ ID NO: 521 - protein, 588 aa, Artificial sequence
  Synthetic sequence
MARGLTDLEINQILELEDVENDVIFDESGDESDHVSIRVESDTEEVEIPTLEPQQGSSDSENDQPLSNLARRSFYKGKDNTIWNRAPPNPRVRTRSENIVTGTPGVKRQAKNALLELDCFHLFVNESILSVILEHTNHKIRSERQGKNTSNEYAYSETTLTELRAVIGLLYLAGLFKSGRQNLQDLWASDGTGIEIFPMTMSLRRFAFIVNCLRFDDSDTREERAAIDRLAPIRQIYEEFVKNCKDVYTPYENLTIDEELVAFRGRCKFRQYLPNKPAKYGIKIIALVDAYTYYSLNMEIYAGDQPDGPYKVSNKPHDVVDRIVQPISQTGRNVTMDNWFTSYPTYAHLLKNHKLTAVGTMKSNKTCIPPKFRERREINTSLFGFQDDFTIVSYIPKRNKNVFMLSSLHHDSEIDSETGEQQKPSIITFYNKTKSGVDNVDKLIRTYDVSRNSRRWPLTIFFWILNTAGINAKIVQMLNSSDNTPTRRAFIKKLGMSLIAPHQAERKTNSKIPVSLRKRIGSHLGESSASPAKIPNVGVKKRCYICPVKKDRKSKYICISCTSHICLEHANFVCENCRRNEEENSDSS

SEQ ID NO: 522 - protein, 613 aa, Artificial sequence
  Synthetic sequence
MEPSTSSGRKRSIGNVHNQRAAKNRRAVVPGTRDFGTTLTSWLDNEDSSGSEVEDIGDNFTPERHEIESDTISQSESEEQVADHVTEEHNMSSDDDAPLSTRRSFYGKNRYKWACQPLSRAVRVPQHNIIQRTNVSNLTEDDPKDPFSIWNKLMDDEILQETLKWTNEKIIQYRSKFSDKDRPELRNLDMVELHAFIGLLLFTAVFKSNHENVNYLFATDGTGREIFRCVMSKNRFLVILHCLRFDNPDDREERRESDKIAAISYIFTKFVGNCQKIYNVCEYATVDEMLVPFRGRTHLMIYMPMKPAKYGLKLMCLCDANNGYFYNCYIYTGRGSDGAGLTEEEKKFMVPTQSVIHLAKPLFGSNRNITCDNWFTSIELIEYLKKKGLTCVGTMKKNKREIPKEFLPSKQRDVGSSLYGYAGQNTILSHVPKKNKAVILLSSMHHAEAVDETTGKPEIIGFYNKTKGGVDEIDKKCAIYTSSRRTRRWPMVVFYRMLDISTVNSHLIYDIHHDKTTERGMFLKQLARTLVLPQMKRRALNERLPRELRLSLARVLGPDMPVPDPQEVDETFKTRRRCHTCPLKLQRKSTHTCYTCKKHVCLQCAKQVCADCV

SEQ ID NO: 523 - protein, 579 aa, Artificial sequence
  Synthetic sequence
MSSRRFTAEEALLLFFDSDAEEEISEIEDLSDAEDNDIDDPDFQFSDDEEDSEDESAVVSPSDENLGMEQSSSTEGTWASKDGNIKWSTSPHQSRGRLSSSNIIKMTPGPTRFAVTRVDDIQSAFQLFISQPIERIILDMTNLEGRRVFQEKWKSLDQTDLNAYIGILILAGVYRSKGEATSSLWNEENGRPIFRATMSLETFHMISRVIRFDNRDTRVGRRESDKLAAIRDVWDKWVEILPLLYNPGPHVTVDERLVPFRGRCPFRQYMPNKPAKYGIKIWAACDAKSSYAWKMQVYTGKSPGGAPEKNQGMRVVLEMSEGLQGHNITCDNFFTSYRLGEELQKRKLTMLGTVRRNKPELPSEILKIQGRPMHSSIFAFTEKATVVSYCPKRNKNVLVMSTMHTDASLSTRDDMKPQMILDYNSTKGGVDNLDKVTATYSCQRKTARWPMAIFFNIVDVSAYNAYVLWSEINQEWNAGKLYRRRLFLEELGKALITPKIQRRARPARSPAAAAVIEKIKFRTSNQFAMDPVDTDVKKRKRCQVCPSRDDSKTSTSCVKCKNFICRKHTVTFCPSCGEH

SEQ ID NO: 524 - protein, 598 aa, Artificial sequence
  Synthetic sequence
MESRQRLNQDEIATILENDDDYSPLDSDSEAEDRVVEDDVWSDNEDAMIDYVEDTSRQEDPDNNIASQESANLEVTSLTSHRIISLPQRSICGKNNHVWSTTKGRTTGRTSAINIIRTNRGPTRMCRNIVDPLLCFQLFITDEIIHEIVKWTNVEMIVKRQNLIDISASYRDTNTMEMWALVGILTLTAVMKDNHLSTDELFDATFSGTRYVSVMSRERFEFLIRCMRMDDKTLRPTLRSDDAFIPVRKLWEIFINQCRLNYVPGGNLTVDEQLLGFRGRCPFRMYIPNKPDKYGIRFPMMCDAATKYMIDAIPYLGKSTKTNGLPLGEFYVKELTKTVHGTNRNVTCDNWFTSIPLAKNMLQAPYNLTIVGTIRSNKREIPEEIKNSRSRPVGSSMFCFDGPLTLVSYKPKPSRMVFLLSSCDENAVINESNGKPDMILFYNQTKGGVDSFDQMCKSMSANRKTNRWPMAVFYGMLNMAFVNSYIIYCHNKINKQKKPINRKEFMKNLSTDLTTPWMQERLKAPTLKRTLRDNITNVLKNVVPPSPANNSEEPGPKKRSYCGFCSYKKRRMTKTQFYKCKKAICGEHNIDVCQDCVG

SEQ ID NO: 525 - protein, 598 aa, Artificial sequence
  Synthetic sequence
MASRQRLNHDEIATILENDDDYSPLDSESEKEDCVVEDDVWSDNEDAIVDFVEDTSAQEDPDNNIASRESPNLEVTSLTSHRIITLPQRSIRGKNNHVWSTTKGRTTGRTSAINIIRTNRGPTRMCRNIVDPLLCFQLFITDEIIHEIVKWTNVEIIVKRQNLKDISASYRDTNTMEIWALVGILTLTAVMKDNHLSTDELFDATFSGTRYVSVMSRERFEFLIRCIRMDDKTLRPTLRSDDAFLPVRKIWEIFINQCRQNHVPGSNLTVDEQLLGFRGRCPFRMYIPNKPDKYGIKFPMMCAAATKYMIDAIPYLGKSTKTNGLPLGEFYVKDLTKTVHGTNRNITCDNWFTSIPLAKNMLQAPYNLTIVGTIRSNKREMPEEIKNSRSRPVGSSMFCFDGPLTLVSYKPKPSKMVFLLSSCDENAVINESNGKPDMILFYNQTKGGVDSFDQMCKSMSANRKTNRWPMAVFYGMLNMAFVNSYIIYCHNKINKQEKPISRKEFMKKLSIQLTTPWMQERLQAPTLKRTLRDNITNVLKNVVPASSENISNEPEPKKRRYCGVCSYKKRRMTKAQCCKCKKAICGEHNIDVCQDCIG

SEQ ID NO: 526 - DNA, 328 bp, Artificial sequence
  Synthetic sequence
cagtgttcttcaacctgtgttccgcggaaccctagggttccacccaaaggctttcggggttccgcgagtcattgcttcaattcgagagacgtcggccgcgccgctcttcagaatgcacatgcgtcaatcggagtttcatgttgaaacatgttatccattcgcatagttgacttacactgcacttaaccttaattttcaaaaatatgtaactgtacttgtggtcgtagttttgttgttgttttaggtttagacaagcaaaggtaagttaacttacagttttaaaataaattgtattttgtttgatcctaacctagaatcgttcagaaat

SEQ ID NO: 527 - DNA, 145 bp, Artificial sequence
  Synthetic sequence
ccaaagcacgggctcaccttgttcgtaacaagtcaacgcagctgtccctaaaatctcatctgggtgtattactaaatgaagggttccataaaaaaaaatatctcgacaaagggttccgccggatggcaaaggttgaagaacactg

SEQ ID NO: 528 - DNA, 16 bp, Artificial sequence
  Synthetic sequence
cagtgttcttcaacct

SEQ ID NO: 529 - DNA, 16 bp, Artificial sequence
  Synthetic sequence
aggttgaagaacactg

SEQ ID NO: 530 - protein, 636 aa, Artificial sequence
  Synthetic sequence
MMLNWLKSGKLESQSQEQSSCYLENSNCLPPTLDSTDIIGEENKAGTTSRKKRKYDEDYLNFGFTWTGDKDEPNGLCVICEQVVNNSSLNPAKLKRHLDTKHPTLKGKSEYFKRKCNELNQKKHTFERYVRDDNKNLLKASYLVSLRIAKQGEAYTIAEKLIKPCTKDLTTCVFGEKFASKVDLVPLSDTTISRRIEDMSYFCEAVLVNRLKNAKCGFTLQMDESTDVAGLAILLVFVRYIHESSFEEDMLFCKALPTQTTGEEIFNLLNAYFEKHSIPWNLCYHICTDGAKAMVGVIKGVIARIKKLVPDIKASHCCLHRHALAVKRIPNALHEVLNDAVKMINFIKSRPLNARVFALLCDDLGSLHKNLLLHTEVRWLSRGKVLTRFWELRDEIRIFFNEREFAGKLNDTSWLQNLAYIADIFSYLNEVNLSLQGPNSTIFKVNSRINSIKSKLKLWEECITKNNTECFANLNDFLETSNTALDPNLKSNILEHLNGLKNTFLEYFPPTCNNISWVENPFNECGNVDTLPIKEREQLIDIRTDTTLKSSFVPDGIGPFWIKLMDEFPEISKRAVKELMPFVTTYLCEKSFSVYVATKTKYRNRLDAEDDMRLQLTTIHPDIDNLCNNKQAQKSH

SEQ ID NO: 531 - DNA, 181 bp, Artificial sequence
  Synthetic sequence
gggtctctctggttagaccagatctgagcctgggagctctctggctaactagggaacccactgcttaagcctcaataaagcttgccttgagtgcttcaagtagtgtgtgcccgtctgttgtgtgactctggtaactagagatccctcagacccttttagtcagtgtggaaaatctctagca

SEQ ID NO: 532 - DNA, 181 bp, Artificial sequence
  Synthetic sequence
gagtctctctggttagaccagatctgagcctgggagctctctggctaactagggaacccactgcttaagcctcaataaagcttgccttgagtgcttcaagtagtgtgtgcccgtctgttgtgtgactctggtaactagagatccctcagacccttttagtcagtgtggaaaatctctagca

SEQ ID NO: 533 - DNA, 145 bp, Artificial sequence
  Synthetic sequence
ttggccactccctctctgcgcgctcgctcgctcactgaggccgggcgaccaaaggtcgcccgacgcccgggctttgcccgggcggcctcagtgagcgagcgagcgcgcagagagggagtggccaactccatcactaggggttcct

SEQ ID NO: 534 - DNA, 145 bp, Artificial sequence
  Synthetic sequence
ttggccactccctctctgcgcgctcgctcgctcactgaggccgcccgggcaaagcccgggcgtcgggcgacctttggtcgcccggcctcagtgagcgagcgagcgcgcagagagggagtggccaactccatcactaggggttcct

SEQ ID NO: 535 - DNA, 168 bp, Artificial sequence
  Synthetic sequence
gcgcgctcgctcgctcactgaggccgcccgggcaaagcccgggcgtcgggcgacctttggtcgcccggcctcagtgagcgagcgagcgcgcagagagggagtggccaactccatcactaggggttccttgtagttaatgattaacccgccatgctacttatctacgta

SEQ ID NO: 536 - DNA, 185 bp, Artificial sequence
  Synthetic sequence
ttggccactccctctctgcgcgctcgctcgctcactgaggccgcccgggcaaagcccgggcgtcgggcgacctttggtcgcccggcctcagtgagcgagcgagcgcgcagagagggagtggccaactccatcactaggggttccttgtagttaatgattaacccgccatgctacttatctacgta

SEQ ID NO: 537 - DNA, 128 bp, Artificial sequence
  Synthetic sequence
gcgcgctcgctcgctcactgaggccgcccgggcaaagcccgggcgtcgggcgacctttggtcgcccggcctcagtgagcgagcgagcgcgcagagagggagtggccaactccatcactaggggttcct

SEQ ID NO: 538 - DNA, 145 bp, Artificial sequence
  Synthetic sequence
ttgcccactccctctatgcgcgctcgctcgctcggtggggcctgcggaccaaaggtccgcagacggcagagctctgctctgccggccccaccgagcgagcgagcgcgcatagagggagtgggcaactccatcactaggggtattc

SEQ ID NO: 539 - DNA, 104 bp, Artificial sequence
  Synthetic sequence
gcgcgctcgctcgctcactgaggccgcccgggcaaagcccgggcgtcgggcgacctttggtcgcccggcctcagtgagcgagcgagcgcgcagagagggagtgg

SEQ ID NO: 540 - DNA, 2235 bp, Artificial sequence
  Synthetic sequence
tctaccgggtaggggaggcgcttttcccaaggcagtctggagcatgcgctttagcagccccgctgggcacttggcgctacacaagtggcctctggcctcgcacacattccacatccaccggtaggcgccaaccggctccgttctttggtggccccttcgcgccaccttctactcctcccctagtcaggaagttcccccccgccccgcagctcgcgtcgtgcaggacgtgacaaatggaagtagcacgactcactagtctcgtgcagatggacagcaccgctgagcaatggaagcgggtaggcctttggggcagcggccaatagcagctttgctccttcgctttctgagagcagcggccgggaaggggcggtgcgggaggcggggtgtggggcggtagtgtgggccctgttcctgcccgcgcggtgttccgcattctgcaagcctccggagcgcacgtccgtctcaggggcagcttgcttgttctttttgcagaagctcagaataaacgctcaactttggccgccacccctgtgtcaaaaggggaggaattgatcaaagagaaccctcatcctaaactgtaccctgagggaactgtcaacaatcaccacttcaaatgcacctcagagggcgagggaaagccctacgaagggacccagacccctcgcattaaggtggtcgaaggcggaccactcccttttgcattcgacatcctggctacctccttcccttacggatcgcgcacttttatcaagtacccgaaggggatcccggacttcttcaagcaatccttccctgagggattcacttgggaacgggtcacgacctacgaagatggaggcgtggtgaccgtgcctcaagacactagcctggaagatggctgccttgtctacaacgtgaagatcagaggtgtgaacttcccatccaatggccccgtgcctcagaaaaagactctggggtgggaagccaataccgaacctctctacccagcggacggaggactcgaaggccggtctgaccctgccctgaagctggtcggaggaggacatttgtcgtgtagctttgtgactacgtaccggtcgaagaagccggccaaaaacctgaagatgccgggtatccacgcggtggaccatagactggaacgcctggaggagagcgataacgagatgttcgtcgttcagagggaacacgctgtggcacgatattgcgatctcccgtcgaagcttggtcacaagctcaattaatgaaaaatctgatcttctgaagaaaatatatttctttttattcatagctcttaactagtggtgatagcaatgtcagcagtgcctttgagttacaatgagacagctggtgaagccacagatgcagctgtctccttgtaactcacaagtaaggttgaccatactctactctagagttgtgttttaatgtatattaatgttactaatgtgtttactagtggtgatagcaatgtcagcagtgccttattctgaccaataaaagcaaggtgaagccacagatgcttgcttttactggtcagaatcaagtaaggttgaccatactctactctaggttatttttagtatgattctgtaaaaatgaattaatactaactagtggtgatagcaatgtcagcagtgcctttttacctgaagaactagcagcgtgaagccacagatggctgctagttattcaggtaaacaagtaaggttgaccatactctactctagtcagttttattgatagtcttttcagtattattgataatcttggggaaaagcttaattaagatccttttccctctgaccagaattatgggaacatcatgaagccccttgagcatctagcttctggctaataaaggaaatttattttcattgcaatagtgtgttggaattttttgtgtctctcactcggaaggacatatgggagggcaaatcatttaaaacatcagaatgagtatttggtttagagtttggcaacatatgcccatatgctggctgccatgaacaaaggttggctataaagaggtcatcagtatatgaaacagccccctgctgtccattccttattccatagaaaagccttgacttgaggttagattttttttatattttgttttgtgttatttttttctttaacatccctaaaattttccttacatgttttactagccagatttttcctcctctcctgactactcccagtcatagctgtccctcttctcttatggagatc

SEQ ID NO: 541 - DNA, 3221 bp, Artificial sequence
  Synthetic sequence
caacctttggagctaagccagcaatggtagagggaagattctgcacgtcccttccaggcggcctccccgtcaccaccccccccaacccgccccgaccggagctgagagtaattcatacaaaaggactcgcccctgccttggggaatcccagggaccgtcgttaaactcccactaacgtagaacccagagatcgctgcgttcccgccccctcacccgcccgctctcgtcatcactgaggtggagaatagcatgcgtgaggctccggtgcccgtcagtgggcagagcgcacatcgcccacagtccccgagaagttggggggaggggtcggcaattgaacgggtgcctagagaaggtggcgcggggtaaactgggaaagtgatgtcgtgtactggctccgcctttttcccgagggtgggggagaaccgtatataagtgcagtagtcgccgtgaacgttctttttcgcaacgggtttgccgccagaacacaggtaagtgccgtgtgtggttcccgcgggcctggcctctttacgggttatggcccttgcgtgccttgaattacttccacctggctccagtacgtgattcttgatcccgagctggagccaggggcgggccttgcgctttaggagccccttcgcctcgtgcttgagttgaggcctggcctgggcgctggggccgccgcgtgcgaatctggtggcaccttcgcgcctgtctcgctgctttcgataagtctctagccatttaaaatttttgatgacgtgctgcgacgctttttttctggcaagatagtcttgtaaatgcgggccaggatctgcacactggtatttcggtttttgggcccgcggccggcgacggggcccgtgcgtcccagcgcacatgttcggcgaggcggggcctgcgagcgcggccaccgagaatcggacgggggtagtctcaagctggccggcctgctctggtgcctggcctcgcgccgccgtgtatcgccccgccctgggcggcaaggctggcccggtcggcaccagttgcgtgagcggaaagatggccgcttcccggccctgctccagggggctcaaaatggaggacgcggcgctcgggagagcgggcgggtgagtcacccacacaaaggaaaagggcctttccgtcctcagccgtcgcttcatgtgactccacggagtaccgggcgccgtccaggcacctcgattagttctggagcttttggagtacgtcgtctttaggttggggggaggggttttatgcgatggagtttccccacactgagtgggtggagactgaagttaggccagcttggcacttgatgtaattctccttggaatttggcctttttgagtttggatcttggttcattctcaagcctcagacagtggttcaaagtttttttcttccatttcaggtgtcgtgaacacgtctcaggggagcttgcttgttctttttgcagaagctcagaataaacgctcaactttggccgccacccctgtgtcaaaaggggaggaattgatcaaagagaaccctcatcctaaactgtaccctgagggaactgtcaacaatcaccacttcaaatgcacctcagagggcgagggaaagccctacgaagggacccagacccctcgcattaaggtggtcgaaggcggaccactcccttttgcattcgacatcctggctacctccttcccttacggatcgcgcacttttatcaagtacccgaaggggatcccggacttcttcaagcaatccttccctgagggattcacttgggaacgggtcacgacctacgaagatggaggcgtggtgaccgtgcctcaagacactagcctggaagatggctgccttgtctacaacgtgaagatcagaggtgtgaacttcccatccaatggccccgtgcctcagaaaaagactctggggtgggaagccaataccgaacctctctacccagcggacggaggactcgaaggccggtctgaccctgccctgaagctggtcggaggaggacatttgtcgtgtagctttgtgactacgtaccggtcgaagaagccggccaaaaacctgaagatgccgggtatccacgcggtggaccatagactggaacgcctggaggagagcgataacgagatgttcgtcgttcagagggaacacgctgtggcacgatattgcgatctcccgtcgaagcttggtcacaagctcaattaatgaaaaatctgatcttctgaagaaaatatatttctttttattcatagctcttaactagtggtgatagcaatgtcagcagtgcctttgagttacaatgagacagctggtgaagccacagatgcagctgtctccttgtaactcacaagtaaggttgaccatactctactctagagttgtgttttaatgtatattaatgttactaatgtgtttactagtggtgatagcaatgtcagcagtgccttattctgaccaataaaagcaaggtgaagccacagatgcttgcttttactggtcagaatcaagtaaggttgaccatactctactctaggttatttttagtatgattctgtaaaaatgaattaatactaactagtggtgatagcaatgtcagcagtgcctttttacctgaagaactagcagcgtgaagccacagatggctgctagttattcaggtaaacaagtaaggttgaccatactctactctagtcagttttattgatagtcttttcagtattattgataatcttggggaaaagctggagcctcggtagccgttcctcctgcccgctgggcctcccaacgggccctcctcccctccttgcaccggcccttcctggtctttgaataaatggctaataaaggaaatttattttcattgcaatagtgtgttggaattttttgtgtctctcactcggaaggacatatgggagggcaaatcatttaaaacatcagaatgagtatttggtttagagtttggcaacatatgcccatatgctggctgccatgaacaaaggttggctataaagaggtcatcagtatatgaaacagccccctgctgtccattccttattccatagaaaagccttgacttgaggttagattttttttatattttgttttgtgttatttttttctttaacatccctaaaattttccttacatgttttactagccagatttttcctcctctcctgactactcccagtcatagctgtccctcttctcttatggagatc

SEQ ID NO: 542 - DNA, 2264 bp, Artificial sequence
  Synthetic sequence
cggggttggggttgcgccttttccaaggcagccctgggtttgcgcagggacgcggctgctctgggcgtggttccgggaaacgcagcggcgccgaccctgggcctcgcacattcttcacgtccgttcgcagcgtcacccggatcttcgccgctacccttgtgggccccccggcgacgcttcctcgtccgcccctaagtcgggaaggttccttgcggttcgcggcgtgccggacgtgacaaacggaagccgcacgactcactagtaccctcgcagacggacagcgccagggagcaatggcagcgcgccgaccgcgatgggctgtggccaatagcggctgctcagcagggcgcgccgagagcagcggccgggaaggggcggtgcgggaggcggggtgtggggcggtagtgtgggccctgttcctgcccgcgcggtgttccgcattctgcaagcctccggagcgcacgtccgtctcaggggagcttgcttgttctttttgcagaagctcagaataaacgctcaactttggccgccacccctgtgtcaaaaggggaggaattgatcaaagagaaccctcatcctaaactgtaccctgagggaactgtcaacaatcaccacttcaaatgcacctcagagggcgagggaaagccctacgaagggacccagacccctcgcattaaggtggtcgaaggcggaccactcccttttgcattcgacatcctggctacctccttcccttacggatcgcgcacttttatcaagtacccgaaggggatcccggacttcttcaagcaatccttccctgagggattcacttgggaacgggtcacgacctacgaagatggaggcgtggtgaccgtgcctcaagacactagcctggaagatggctgccttgtctacaacgtgaagatcagaggtgtgaacttcccatccaatggccccgtgcctcagaaaaagactctggggtgggaagccaataccgaacctctctacccagcggacggaggactcgaaggccggtctgaccctgccctgaagctggtcggaggaggacatttgtcgtgtagctttgtgactacgtaccggtcgaagaagccggccaaaaacctgaagatgccgggtatccacgcggtggaccatagactggaacgcctggaggagagcgataacgagatgttcgtcgttcagagggaacacgctgtggcacgatattgcgatctcccgtcgaagcttggtcacaagctcaattaatgaaaaatctgatcttctgaagaaaatatatttctttttattcatagctcttaactagtggtgatagcaatgtcagcagtgcctttgagttacaatgagacagctggtgaagccacagatgcagctgtctccttgtaactcacaagtaaggttgaccatactctactctagagttgtgttttaatgtatattaatgttactaatgtgtttactagtggtgatagcaatgtcagcagtgccttattctgaccaataaaagcaaggtgaagccacagatgcttgcttttactggtcagaatcaagtaaggttgaccatactctactctaggttatttttagtatgattctgtaaaaatgaattaatactaactagtggtgatagcaatgtcagcagtgcctttttacctgaagaactagcagcgtgaagccacagatggctgctagttattcaggtaaacaagtaaggttgaccatactctactctagtcagttttattgatagtcttttcagtattattgataatcttggggaaaagctggagcctcggtagccgttcctcctgcccgctgggcctcccaacgggccctcctcccctccttgcaccggcccttcctggtctttgaataaatggctaataaaggaaatttattttcattgcaatagtgtgttggaattttttgtgtctctcactcggaaggacatatgggagggcaaatcatttaaaacatcagaatgagtatttggtttagagtttggcaacatatgcccatatgctggctgccatgaacaaaggttggctataaagaggtcatcagtatatgaaacagccccctgctgtccattccttattccatagaaaagccttgacttgaggttagattttttttatattttgttttgtgttatttttttctttaacatccctaaaattttccttacatgttttactagccagatttttcctcctctcctgactactcccagtcatagctgtccctcttctcttatggagatc

SEQ ID NO: 543 - DNA, 3089 bp, Artificial sequence
  Synthetic sequence
gggtccgaatttcaaagtcctttttattgacttacaaggttttcaaggaaaatcttggaagtaactgtgttccgaagaatctacgtttaaaaaccgacccctggatctttgccttgggtccaaggaccgagctggccacgccccagccgcgccgcagccactcccaaggcagttcaagtgttaagcccgaaaggtagagctctgcgcatgtgcacacccgtccatagctgggtcccagccaaccaggccggaggagcacccgcgccgtcacgtgacgtgcccaaccggcgtcgacctataaaaggccgggcgttgacgtcagcggactcttccgccgcagccgccgccatcgtcggcgcgcttccctgttcacctctgtatttgagaatccgacgccatctgccaccaggtgagtgtccgcggcgcggcaagacttggggactgtgacgagacttcggggcagcgggaggtggccggagcgggacccggaaaagaaaggagacatggctgcctctgcatgggtggcgggacgtggtcggctcgcggcgccatatctgcacctcctctgcccgtctttgggagtgtcggcctcctgaagttggagtgttttctctaattccttcgtccagctctcctttccgagaacgctggggtggctgtgggaggggcggcgtttgctgatgtggcagcggacataatgctgtatagccctgtgcccatggtgacagggtgatggtgctcccgggaagtgacagcctgcaggggtggctcacatggtgacctctagtgagctgagcctcttccgccctggcctttatctccttccttggtccgcacaatggaaccggtcccctccaagctgagaaaatggctcatgggcctaggggcctattgtggcctttgatcccagcatttgaccttggcgcacaaggcgggttggcagtgtgtagcaggcgaggttttgtcggcctgtgtgggccccatctcgtgcgggccccctgtcgcctgcattgttggactgctggggtggcagtccagcttggcgttgattacgtggtgcggtcacagcctaggctccctggtactcttgttctagttgtcattttggttagggttgggttcctgacacatctggtgactcttgatgcttcttaggtggtaggcttgtaggtgtgagtcgaatgagcgccagttttggggagacagctctttggaaccccacaatggggtgctatcgacccgagttcccagaatcagtcctgaccgcccttcccccaccacaggtgaacttcgtctcaggggagcttgcttgttctttttgcagaagctcagaataaacgctcaactttggccgccacccctgtgtcaaaaggggaggaattgatcaaagagaaccctcatcctaaactgtaccctgagggaactgtcaacaatcaccacttcaaatgcacctcagagggcgagggaaagccctacgaagggacccagacccctcgcattaaggtggtcgaaggcggaccactcccttttgcattcgacatcctggctacctccttcccttacggatcgcgcacttttatcaagtacccgaaggggatcccggacttcttcaagcaatccttccctgagggattcacttgggaacgggtcacgacctacgaagatggaggcgtggtgaccgtgcctcaagacactagcctggaagatggctgccttgtctacaacgtgaagatcagaggtgtgaacttcccatccaatggccccgtgcctcagaaaaagactctggggtgggaagccaataccgaacctctctacccagcggacggaggactcgaaggccggtctgaccctgccctgaagctggtcggaggaggacatttgtcgtgtagctttgtgactacgtaccggtcgaagaagccggccaaaaacctgaagatgccgggtatccacgcggtggaccatagactggaacgcctggaggagagcgataacgagatgttcgtcgttcagagggaacacgctgtggcacgatattgcgatctcccgtcgaagcttggtcacaagctcaattaatgaaaaatctgatcttctgaagaaaatatatttctttttattcatagctcttaactagtggtgatagcaatgtcagcagtgcctttgagttacaatgagacagctggtgaagccacagatgcagctgtctccttgtaactcacaagtaaggttgaccatactctactctagagttgtgttttaatgtatattaatgttactaatgtgtttactagtggtgatagcaatgtcagcagtgccttattctgaccaataaaagcaaggtgaagccacagatgcttgcttttactggtcagaatcaagtaaggttgaccatactctactctaggttatttttagtatgattctgtaaaaatgaattaatactaactagtggtgatagcaatgtcagcagtgcctttttacctgaagaactagcagcgtgaagccacagatggctgctagttattcaggtaaacaagtaaggttgaccatactctactctagtcagttttattgatagtcttttcagtattattgataatcttggggaaaagctggagcctcggtagccgttcctcctgcccgctgggcctcccaacgggccctcctcccctccttgcaccggcccttcctggtctttgaataaatggctaataaaggaaatttattttcattgcaatagtgtgttggaattttttgtgtctctcactcggaaggacatatgggagggcaaatcatttaaaacatcagaatgagtatttggtttagagtttggcaacatatgcccatatgctggctgccatgaacaaaggttggctataaagaggtcatcagtatatgaaacagccccctgctgtccattccttattccatagaaaagccttgacttgaggttagattttttttatattttgttttgtgttatttttttctttaacatccctaaaattttccttacatgttttactagccagatttttcctcctctcctgactactcccagtcatagctgtccctcttctcttatggagatc

SEQ ID NO: 544 - DNA, 7456 bp, Artificial sequence
  Synthetic sequence
ttaaccctcatattatgttaagggtcaatttgacccatttcagtttttggtttgaccaaagaactggttatcctttctttttcttcacgaaagttggtgacttttcctcatctagggtcatgaacttgtgtgtaaaatctggatactgtgaagtgtcgtggaatgtctgtgaacagtttgtatacaaagatgatgttgcgggtcattttgacccacacactttgatgtgagcaagtagctgtccagatccgaaataaacatgtctctttgatgcactttattttgattgctaaattatttatattttgactgtctctgaatagaccttcagatcagagactcaggtgtgtgtgggggaggagctttctctcccttgtccttgtcactgttctcgtgtcatctctttgagaaacagcaaaactgtctaactggtccgatccttaacctttaactgctgaggtgggggcttttcgagcctagcgaaagtgaaattgttcccctcctcccttcccccgcgcgcgacaaacccgtaacttctagtagcttcgatgttagttgcgcctaggccgtcagaagcttcgcacgtgttttcgtgcgcaattcggtaagtaaattcaatttgaaatttgtcgcgggcttcttaggccccacctcagtgtttacgtaacttttttgtaaatagtttcgattaagttattgtgttttttttttgcagtagcttgaaaacgtttgaaaaggctgagttgacgtatctgtttaacccttggcatgcctggtagggtttattagacccaccactttgaaaaacctatgatatttttttaaattgaaggctattgttgacgtgtgttatagtagcttcgcgcaataaaccggcggccattttgacgagcgaacttcagtctcacgtgagcgtgcgtgcgagtagcacgtgtgtaaagtgcgcgcgggcccgtgggaccctaccaggcatacaacgtaacattctgtcggtaagaatattttctttattttttggcatttctttgtttaatgtgttaaattataatacgaaaaaaatattgttgcagtagaagctagcgcgagctcacggggacagcccccccccaaagcccccagggatgtaattacgtccctcccccgctagggggcagcagcgagccgcccggggctccgctccggtccggcgctccccccgcatccccgagccggcagcgtgcggggacagcccgggcacggggaaggtggcacgggatcgctttcctctgaacgcttctcgctgctctttgagcctgcagacacctggggggatacggggaaaaagctttaggctgaaagagagatttagaatgacagaatcatagaacggcctgggttgcaaaggagcacagtgctcatccagatccaaccccctgctatgtgcagggtcatcaaccagcagcccaggctgcccagagccacatccagcctggccttgaatgcctgcagggatggggcatccacagcctccttgggcaacctgttcagtgcgtcaccaccctctgggggaaaaactgcctcctcatatccaacccaaacctcccctgtctcagtgtaaagccattcccccttgtcctatcaagggggagtttgctgtgacattgttggtctggggtgacacatgtttgccaattcagtgcatcacggagaggcagatcttggggataaggaagtgcaggacagcatggacgtgggacatgctggtgttgagggctctgggacactctccaagtcacagcgttcagaacagccttaaggataagaagataggatagaaggacaaagagcaagttaaaacccagcatggagaggagcacaaaaaggccacagacactgctggtccctgtgtctgagcctgcatgtttgatggtgtctggatgcaagcagaaggggtggaagtgcttgcctggagagatacagctgggtcagtaggactgggacaggcagctggagaattgccatgtagatgttcatacaatcgtcaaatcatgaaggctggaaaagccctccaagatccccaagaccaaccccaacccacccaccgtgcccactggccatgtccctcagtgccacatccccacagttcttcatcacctccagggacggtgacccccccacctccgtgggcagctgtgccactgcagcaccgctctttggagaaggtaaatcttgctaaatccagcccgaccctcccctggcacaacgtaaggccattatctctcatccaactccaggacggagtcagtgagaatattggtaccggggtgtggtaagcaggttttctttatgttttaaatgcactgacctcccacattccctttttagtaaaatattcagaaataatttaaatacatcattgcaatgaaaataaatgttttttattaggcagaatccagatgctcaaggcccttcataatatcccccagtttagtagttggacttagggaacaaaggaacctttaatagaaattggacagcaagaaagcgagtcatcagaagaactcgtcaagaaggcgatagaaggcgatgcgctgcgaatcgggagcggcgataccgtaaagcacgaggaagcggtcagcccattcgccgccaagttcctcagcaatatcacgggtagccaacgctatgtcctgatagcggtccgccacacccagccggccacagtcgatgaatccagaaaagcggccattttccaccatgatattcggcaagcaggcatcgccatgggtcacgacgagatcctcgccgtcgggcatgcgcgccttgagcctggcgaacagttcggctggcgcgagcccctgatgttcctcgtccagatcatcctgatcgacaagaccggcttccatccgagtacgtgctcgctcgatgcgatgtttcgcttggtggtcgaatgggcatgtagccggatcaagcgtatgcagccgccgcattgcatcagccatgatggatactttctcggcaggagcaaggtgagatgacaggagatcctgccccggcacttcgcccaatagcagccagtcccttcccgcttcagtgacaacgtcgagcacagctgcgcaaggaacgcccgtcgtggccagccacgatagccgcgctgcctcgtcctgcagttcattcagggcaccggacaggtcggtcttgacaaaaagaaccgggcgcccctgcgctgacagccggaacacggcggcatcagagcagccgattgtctgttgtgcccagtcatagccgaatagcctctccacccaagcggccggagaaccagcgtgcaatccatcttgttcaatcatgccaccctgcagagtcgctctgtgttcgaggccacacgcgtcaccttaatatgcgaagtggacctgggaccgcgccgccccgactgcatctgcgtgttttcgccaatgacaagacgctgggcggggtttgtgtcatcatagaactaaagacatgcaaatatatttcttccggggacaccgccagcaaacgcgagcaacgggccacggggatgaagcagctggaaacttgatctgtcgccgcaattcaaacttcgtgaggctccggtgcccgtcagtgacctgctatactctggagacgtctaccgggtaggggaggcgcttttcccaaggcagtctggagcatgcgctttagcagccccgctgggcacttggcgctacacaagtggcctctggcctcgcacacattccacatccaccggtaggcgccaaccggctccgttctttggtggccccttcgcgccaccttctactcctcccctagtcaggaagttcccccccgccccgcagctcgcgtcgtgcaggacgtgacaaatggaagtagcacgactcactagtctcgtgcagatggacagcaccgctgagcaatggaagcgggtaggcctttggggcagcggccaatagcagctttgctccttcgctttctgagagcagcggccgggaaggggcggtgcgggaggcggggtgtggggcggtagtgtgggccctgttcctgcccgcgcggtgttccgcattctgcaagcctccggagcgcacgtccgtctcaggggcagcttgcttgttctttttgcagaagctcagaataaacgctcaactttggccgccacccctgtgtcaaaaggggaggaattgatcaaagagaaccctcatcctaaactgtaccctgagggaactgtcaacaatcaccacttcaaatgcacctcagagggcgagggaaagccctacgaagggacccagacccctcgcattaaggtggtcgaaggcggaccactcccttttgcattcgacatcctggctacctccttcccttacggatcgcgcacttttatcaagtacccgaaggggatcccggacttcttcaagcaatccttccctgagggattcacttgggaacgggtcacgacctacgaagatggaggcgtggtgaccgtgcctcaagacactagcctggaagatggctgccttgtctacaacgtgaagatcagaggtgtgaacttcccatccaatggccccgtgcctcagaaaaagactctggggtgggaagccaataccgaacctctctacccagcggacggaggactcgaaggccggtctgaccctgccctgaagctggtcggaggaggacatttgtcgtgtagctttgtgactacgtaccggtcgaagaagccggccaaaaacctgaagatgccgggtatccacgcggtggaccatagactggaacgcctggaggagagcgataacgagatgttcgtcgttcagagggaacacgctgtggcacgatattgcgatctcccgtcgaagcttggtcacaagctcaattaatgaaaaatctgatcttctgaagaaaatatatttctttttattcatagctcttaactagtggtgatagcaatgtcagcagtgcctttgagttacaatgagacagctggtgaagccacagatgcagctgtctccttgtaactcacaagtaaggttgaccatactctactctagagttgtgttttaatgtatattaatgttactaatgtgtttactagtggtgatagcaatgtcagcagtgccttattctgaccaataaaagcaaggtgaagccacagatgcttgcttttactggtcagaatcaagtaaggttgaccatactctactctaggttatttttagtatgattctgtaaaaatgaattaatactaactagtggtgatagcaatgtcagcagtgcctttttacctgaagaactagcagcgtgaagccacagatggctgctagttattcaggtaaacaagtaaggttgaccatactctactctagtcagttttattgatagtcttttcagtattattgataatcttggggaaaagcttaattaagatccttttccctctgaccagaattatgggaacatcatgaagccccttgagcatctagcttctggctaataaaggaaatttattttcattgcaatagtgtgttggaattttttgtgtctctcactcggaaggacatatgggagggcaaatcatttaaaacatcagaatgagtatttggtttagagtttggcaacatatgcccatatgctggctgccatgaacaaaggttggctataaagaggtcatcagtatatgaaacagccccctgctgtccattccttattccatagaaaagccttgacttgaggttagattttttttatattttgttttgtgttatttttttctttaacatccctaaaattttccttacatgttttactagccagatttttcctcctctcctgactactcccagtcatagctgtccctcttctcttatggagatcagaaaattttgtgtcgcccttcgctgaacaccaggtgggccgcctactgcgcacgcgcgggtttgcgggcagccgcctgggctgtgggagcagcccgggcagagctctcctgcctctccaccagcccaccccgccgcctgaccgccccctccccaccccccaccccccacccccggaaaacgcgtcgtcccctgggctgggtggtgacccccgtcccgcgaaacaccgggccccgcgcagcgtccgggcctgacaccgctccggcggctcgcctcctatgcgcccccgcgccaccgtcgcccgcccgcccgggcccctgcagccgcccaggtgccagcacggagcgcctggcggcggaacgcagaccccaggcccggcgcacaccggggacgctgagcgttccaggcgggagggaaggcgggcagagatggagagaggaacgggagtcctagaggggcggaaggacgggcggagggacgttaggagggagggagggaggcagggaggcagggaggaacggagggaaagacagagcgacgcagggactgggggcgggcgggagggagccggggaacggggggaggaaggcagggaggaaaagcggtcctcggcctccgggagtagcgggacccccgccctccgggaaaacggtcagcgtccggcgcgggctgagggctgggcccacagccgccgcgccggccggcggggcaccacccattcgccccggttccgtggcccagggagtgggcggtttcctccgggacaaaagaccgggactcgggttgccgtcgggtgttcacccgcgcggttcacagaccgcacatccccaggctgagccctgcaacgcggcgcgaggccgacagccccggccacggaggagccacacgcaggacgacggaggcgtgattttggtttccgcgtggctttgccctccgcaaggcggcctgttgctcaagtctctccggcccccgaaaggctggccatgccgactgtttgctcccggagctctgcgggcacccggaaacatgcagggaagggtgcaagcccggcacggtgccttcgctctccttgccaggttccaaaccggccacactgcagactccccacgttgccgcacgcgggaatccatcgtcaggccatcacgccggggaggcatctcctctctggggtgtcgctctggacttctacgtggaaatgaacgagagccacacgcctgcgtgtgccagaccgtcccggcaacggcgacgcccacaggcattgcctccttcacggagagagggcctggcacactcaagactcccacggaggttcagttccacactccacctaggagatactgaatattgaaaatctcagaaaatgtgacaagttaaattacaaaaaaaaagtgtttgtgaaggaaaaaaatattaaatatagtgttggaataaaaaaatagtattgtttgtctctttcctaaatgttgaaatattctaaaataaagttgatatcagtttaacctgtttttttattgttttgagtggatttacacagtatgggtcaaaatgacccgcaacataatcaaggtaattttttttcaacataatacgagggttaa

SEQ ID NO: 545 - DNA, 7848 bp, Artificial sequence
  Synthetic sequence
ttaacccggcgagcatgaggtgaaaaaaagttacatcaagaatgtggcagggtatgacatacccatattttgttgtactataatattgttcttattattatttactcaattatgttgatcttattttgtaaaataatggtttatttaatggcattcaatgaaagaagtttttaattatgaaattattattatttattaatctttttcttaaacacagtaattttagcaacaaacatttagaggtttacaaaaatcaacaatttaacaaaaatattattctttggaatataaatcaacctaatactgaaagataatgagattcttttcattataaaacatataattatttttttaaactaaaaatatgacctagcgcgagctcacggggacagcccccccccaaagcccccagggatgtaattacgtccctcccccgctagggggcagcagcgagccgcccggggctccgctccggtccggcgctccccccgcatccccgagccggcagcgtgcggggacagcccgggcacggggaaggtggcacgggatcgctttcctctgaacgcttctcgctgctctttgagcctgcagacacctggggggatacggggaaaaagctttaggctgaaagagagatttagaatgacagaatcatagaacggcctgggttgcaaaggagcacagtgctcatccagatccaaccccctgctatgtgcagggtcatcaaccagcagcccaggctgcccagagccacatccagcctggccttgaatgcctgcagggatggggcatccacagcctccttgggcaacctgttcagtgcgtcaccaccctctgggggaaaaactgcctcctcatatccaacccaaacctcccctgtctcagtgtaaagccattcccccttgtcctatcaagggggagtttgctgtgacattgttggtctggggtgacacatgtttgccaattcagtgcatcacggagaggcagatcttggggataaggaagtgcaggacagcatggacgtgggacatgctggtgttgagggctctgggacactctccaagtcacagcgttcagaacagccttaaggataagaagataggatagaaggacaaagagcaagttaaaacccagcatggagaggagcacaaaaaggccacagacactgctggtccctgtgtctgagcctgcatgtttgatggtgtctggatgcaagcagaaggggtggaagtgcttgcctggagagatacagctgggtcagtaggactgggacaggcagctggagaattgccatgtagatgttcatacaatcgtcaaatcatgaaggctggaaaagccctccaagatccccaagaccaaccccaacccacccaccgtgcccactggccatgtccctcagtgccacatccccacagttcttcatcacctccagggacggtgacccccccacctccgtgggcagctgtgccactgcagcaccgctctttggagaaggtaaatcttgctaaatccagcccgaccctcccctggcacaacgtaaggccattatctctcatccaactccaggacggagtcagtgagaatattggtaccggggtgtggtgtcttctttctttatgttttaaatgcactgacctcccacattccctttttagtaaaatattcagaaataatttaaatacatcattgcaatgaaaataaatgttttttattaggcagaatccagatgctcaaggcccttcataatatcccccagtttagtagttggacttagggaacaaaggaacctttaatagaaattggacagcaagaaagcgagtcaggcaccgggcttgcgggtcatgcaccaggtgcgcggtccttcgggcacctcgacgtcggcggtgacggtgaagccgagccgctcgtagaaggggaggttgcggggcgcggatgtctccaggaaggcgggcaccccggcgcgctcggccgcctccactccggggagcacgacggcgctgcccagacccttgccctggtggtcgggcgacacgccgacggtggccaggaaccacgcgggctccttgggccggtgcggcgccaggaggccttccatctgttgctgcgcggccagccgggaaccgctcaactcggccatgcgcgggccgatctcggcgaacaccgcccccgcttcgacgctctccggcgtggtccagaccgccaccgcggcgccgtcgtccgcgacccacaccttgccgatgtcgagcccgacgcgcgtgaggaagagttcttgcagctcggtgacccgctcgatgtggcggtccggatcgacggtgtggcgcgtggcggggtagtcggcgaacgcggcggcgagggtgcgtacggccctggggacgtcgtcgcgggtggcgaggcgcaccgtgggcttgtactcggtcatggtggcggacgaaaggcccggagatgaggaagaggagaacagcgcggcagacgtgcgcttttgaagcgtgcagaatgccgggcctccggaggaccttcgggcgcccgccccgcccctgagcccgcccctgagcccgcccccggacccaccccttcccagcctctgagcccagaaagcgaaggagcaaagctgctattggccgctgccccaaaggcctacccgcttccattgctcagcggtgctgtccatctgcacgagactagtgagtcgtgctacttccatttgtcacgtcctgcacgacgcgagctgcggggcgggggggaacttcctgactaggggaggagtagaaggtggcgcgaaggggccaccaaagaacggagccggttggcgcctaccggtggatgtggaatgtgtgcgaggccagaggccacttgtgtagcgccaagtgcccagcggggctgctaaagcgcatgctccagactgccttgggaaaagcgcctcccctacccggtagagaaacttgatctgtcgccgcaattcaaacttcgtgaggctccggtgcccgtcagtggaagactactctggagacgcaacctttggagctaagccagcaatggtagagggaagattctgcacgtcccttccaggcggcctccccgtcaccaccccccccaacccgccccgaccggagctgagagtaattcatacaaaaggactcgcccctgccttggggaatcccagggaccgtcgttaaactcccactaacgtagaacccagagatcgctgcgttcccgccccctcacccgcccgctctcgtcatcactgaggtggagaatagcatgcgtgaggctccggtgcccgtcagtgggcagagcgcacatcgcccacagtccccgagaagttggggggaggggtcggcaattgaacgggtgcctagagaaggtggcgcggggtaaactgggaaagtgatgtcgtgtactggctccgcctttttcccgagggtgggggagaaccgtatataagtgcagtagtcgccgtgaacgttctttttcgcaacgggtttgccgccagaacacaggtaagtgccgtgtgtggttcccgcgggcctggcctctttacgggttatggcccttgcgtgccttgaattacttccacctggctccagtacgtgattcttgatcccgagctggagccaggggcgggccttgcgctttaggagccccttcgcctcgtgcttgagttgaggcctggcctgggcgctggggccgccgcgtgcgaatctggtggcaccttcgcgcctgtctcgctgctttcgataagtctctagccatttaaaatttttgatgacgtgctgcgacgctttttttctggcaagatagtcttgtaaatgcgggccaggatctgcacactggtatttcggtttttgggcccgcggccggcgacggggcccgtgcgtcccagcgcacatgttcggcgaggcggggcctgcgagcgcggccaccgagaatcggacgggggtagtctcaagctggccggcctgctctggtgcctggcctcgcgccgccgtgtatcgccccgccctgggcggcaaggctggcccggtcggcaccagttgcgtgagcggaaagatggccgcttcccggccctgctccagggggctcaaaatggaggacgcggcgctcgggagagcgggcgggtgagtcacccacacaaaggaaaagggcctttccgtcctcagccgtcgcttcatgtgactccacggagtaccgggcgccgtccaggcacctcgattagttctggagcttttggagtacgtcgtctttaggttggggggaggggttttatgcgatggagtttccccacactgagtgggtggagactgaagttaggccagcttggcacttgatgtaattctccttggaatttggcctttttgagtttggatcttggttcattctcaagcctcagacagtggttcaaagtttttttcttccatttcaggtgtcgtgaacacgtctcaggggagcttgcttgttctttttgcagaagctcagaataaacgctcaactttggccgccacccctgtgtcaaaaggggaggaattgatcaaagagaaccctcatcctaaactgtaccctgagggaactgtcaacaatcaccacttcaaatgcacctcagagggcgagggaaagccctacgaagggacccagacccctcgcattaaggtggtcgaaggcggaccactcccttttgcattcgacatcctggctacctccttcccttacggatcgcgcacttttatcaagtacccgaaggggatcccggacttcttcaagcaatccttccctgagggattcacttgggaacgggtcacgacctacgaagatggaggcgtggtgaccgtgcctcaagacactagcctggaagatggctgccttgtctacaacgtgaagatcagaggtgtgaacttcccatccaatggccccgtgcctcagaaaaagactctggggtgggaagccaataccgaacctctctacccagcggacggaggactcgaaggccggtctgaccctgccctgaagctggtcggaggaggacatttgtcgtgtagctttgtgactacgtaccggtcgaagaagccggccaaaaacctgaagatgccgggtatccacgcggtggaccatagactggaacgcctggaggagagcgataacgagatgttcgtcgttcagagggaacacgctgtggcacgatattgcgatctcccgtcgaagcttggtcacaagctcaattaatgaaaaatctgatcttctgaagaaaatatatttctttttattcatagctcttaactagtggtgatagcaatgtcagcagtgcctttgagttacaatgagacagctggtgaagccacagatgcagctgtctccttgtaactcacaagtaaggttgaccatactctactctagagttgtgttttaatgtatattaatgttactaatgtgtttactagtggtgatagcaatgtcagcagtgccttattctgaccaataaaagcaaggtgaagccacagatgcttgcttttactggtcagaatcaagtaaggttgaccatactctactctaggttatttttagtatgattctgtaaaaatgaattaatactaactagtggtgatagcaatgtcagcagtgcctttttacctgaagaactagcagcgtgaagccacagatggctgctagttattcaggtaaacaagtaaggttgaccatactctactctagtcagttttattgatagtcttttcagtattattgataatcttggggaaaagctggagcctcggtagccgttcctcctgcccgctgggcctcccaacgggccctcctcccctccttgcaccggcccttcctggtctttgaataaatggctaataaaggaaatttattttcattgcaatagtgtgttggaattttttgtgtctctcactcggaaggacatatgggagggcaaatcatttaaaacatcagaatgagtatttggtttagagtttggcaacatatgcccatatgctggctgccatgaacaaaggttggctataaagaggtcatcagtatatgaaacagccccctgctgtccattccttattccatagaaaagccttgacttgaggttagattttttttatattttgttttgtgttatttttttctttaacatccctaaaattttccttacatgttttactagccagatttttcctcctctcctgactactcccagtcatagctgtccctcttctcttatggagatcacctgctcagtcagaaaatctagagcgagctcacggggacagcccccccccaaagcccccagggatgtaattacgtccctcccccgctagggggcagcagcgagccgcccggggctccgctccggtccggcgctccccccgcatccccgagccggcagcgtgcggggacagcccgggcacggggaaggtggcacgggatcgctttcctctgaacgcttctcgctgctctttgagcctgcagacacctggggggatacggggaaaaagctttaggctgaaagagagatttagaatgacagaatcatagaacggcctgggttgcaaaggagcacagtgctcatccagatccaaccccctgctatgtgcagggtcatcaaccagcagcccaggctgcccagagccacatccagcctggccttgaatgcctgcagggatggggcatccacagcctccttgggcaacctgttcagtgcgtcaccaccctctgggggaaaaactgcctcctcatatccaacccaaacctcccctgtctcagtgtaaagccattcccccttgtcctatcaagggggagtttgctgtgacattgttggtctggggtgacacatgtttgccaattcagtgcatcacggagaggcagatcttggggataaggaagtgcaggacagcatggacgtgggacatgctggtgttgagggctctgggacactctccaagtcacagcgttcagaacagccttaaggataagaagataggatagaaggacaaagagcaagttaaaacccagcatggagaggagcacaaaaaggccacagacactgctggtccctgtgtctgagcctgcatgtttgatggtgtctggatgcaagcagaaggggtggaagtgcttgcctggagagatacagctgggtcagtaggactgggacaggcagctggagaattgccatgtagatgttcatacaatcgtcaaatcatgaaggctggaaaagccctccaagatccccaagaccaaccccaacccacccaccgtgcccactggccatgtccctcagtgccacatccccacagttcttcatcacctccagggacggtgacccccccacctccgtgggcagctgtgccactgcagcaccgctctttggagaaggtaaatcttgctaaatccagcccgaccctcccctggcacaacgtaaggccattatctctcatccaactccaggacggagtcagtgagaatattcctagctttgatcaaaaactgaaaataataaaaaaaaactcaactaaaggaacgaaagacaaccgatacagtaaatcataaaaaaagaacaatggataacataaaaataccaataaaacagttgaaattaataatcggaaaaattacataaaaaaaatacgtcaacaatgaggcagggtataacatacccgaaacaggtttgcacacgaatatctcgccggtgtcccgtgccacactgcgatcacgccactatcccctcccgcacgctcctgcctccagctactgagcgcgctagtgttgtcagacgaaaattttataaaatacacaactttaaaattttaccagggtatgagataccctgcctcatgctcgccgggttaa

SEQ ID NO: 546 - DNA, 6895 bp, Artificial sequence
  Synthetic sequence
ttaacccggcgagcatgaggtgaaaaaaagttacatcaagaatgtggcagggtatgacatacccatattttgttgtactataatattgttcttattattatttactcaattatgttgatcttattttgtaaaataatggtttatttaatggcattcaatgaaagaagtttttaattatgaaattattattatttattaatctttttcttaaacacagtaattttagcaacaaacatttagaggtttacaaaaatcaacaatttaacaaaaatattattctttggaatataaatcaacctaatactgaaagataatgagattcttttcattataaaacatataattatttttttaaactaaaaatatgacctagcgcgagctcacggggacagcccccccccaaagcccccagggatgtaattacgtccctcccccgctagggggcagcagcgagccgcccggggctccgctccggtccggcgctccccccgcatccccgagccggcagcgtgcggggacagcccgggcacggggaaggtggcacgggatcgctttcctctgaacgcttctcgctgctctttgagcctgcagacacctggggggatacggggaaaaagctttaggctgaaagagagatttagaatgacagaatcatagaacggcctgggttgcaaaggagcacagtgctcatccagatccaaccccctgctatgtgcagggtcatcaaccagcagcccaggctgcccagagccacatccagcctggccttgaatgcctgcagggatggggcatccacagcctccttgggcaacctgttcagtgcgtcaccaccctctgggggaaaaactgcctcctcatatccaacccaaacctcccctgtctcagtgtaaagccattcccccttgtcctatcaagggggagtttgctgtgacattgttggtctggggtgacacatgtttgccaattcagtgcatcacggagaggcagatcttggggataaggaagtgcaggacagcatggacgtgggacatgctggtgttgagggctctgggacactctccaagtcacagcgttcagaacagccttaaggataagaagataggatagaaggacaaagagcaagttaaaacccagcatggagaggagcacaaaaaggccacagacactgctggtccctgtgtctgagcctgcatgtttgatggtgtctggatgcaagcagaaggggtggaagtgcttgcctggagagatacagctgggtcagtaggactgggacaggcagctggagaattgccatgtagatgttcatacaatcgtcaaatcatgaaggctggaaaagccctccaagatccccaagaccaaccccaacccacccaccgtgcccactggccatgtccctcagtgccacatccccacagttcttcatcacctccagggacggtgacccccccacctccgtgggcagctgtgccactgcagcaccgctctttggagaaggtaaatcttgctaaatccagcccgaccctcccctggcacaacgtaaggccattatctctcatccaactccaggacggagtcagtgagaatattggtaccggggtgtggtgtcttctttctttatgttttaaatgcactgacctcccacattccctttttagtaaaatattcagaaataatttaaatacatcattgcaatgaaaataaatgttttttattaggcagaatccagatgctcaaggcccttcataatatcccccagtttagtagttggacttagggaacaaaggaacctttaatagaaattggacagcaagaaagcgagtcaggcaccgggcttgcgggtcatgcaccaggtgcgcggtccttcgggcacctcgacgtcggcggtgacggtgaagccgagccgctcgtagaaggggaggttgcggggcgcggatgtctccaggaaggcgggcaccccggcgcgctcggccgcctccactccggggagcacgacggcgctgcccagacccttgccctggtggtcgggcgacacgccgacggtggccaggaaccacgcgggctccttgggccggtgcggcgccaggaggccttccatctgttgctgcgcggccagccgggaaccgctcaactcggccatgcgcgggccgatctcggcgaacaccgcccccgcttcgacgctctccggcgtggtccagaccgccaccgcggcgccgtcgtccgcgacccacaccttgccgatgtcgagcccgacgcgcgtgaggaagagttcttgcagctcggtgacccgctcgatgtggcggtccggatcgacggtgtggcgcgtggcggggtagtcggcgaacgcggcggcgagggtgcgtacggccctggggacgtcgtcgcgggtggcgaggcgcaccgtgggcttgtactcggtcatggtggcggacgaaaggcccggagatgaggaagaggagaacagcgcggcagacgtgcgcttttgaagcgtgcagaatgccgggcctccggaggaccttcgggcgcccgccccgcccctgagcccgcccctgagcccgcccccggacccaccccttcccagcctctgagcccagaaagcgaaggagcaaagctgctattggccgctgccccaaaggcctacccgcttccattgctcagcggtgctgtccatctgcacgagactagtgagtcgtgctacttccatttgtcacgtcctgcacgacgcgagctgcggggcgggggggaacttcctgactaggggaggagtagaaggtggcgcgaaggggccaccaaagaacggagccggttggcgcctaccggtggatgtggaatgtgtgcgaggccagaggccacttgtgtagcgccaagtgcccagcggggctgctaaagcgcatgctccagactgccttgggaaaagcgcctcccctacccggtagagaaacttgatctgtcgccgcaattcaaacttcgtgaggctccggtgcccgtcagtggaagactactctggagacgattccggggttggggttgcgccttttccaaggcagccctgggtttgcgcagggacgcggctgctctgggcgtggttccgggaaacgcagcggcgccgaccctgggcctcgcacattcttcacgtccgttcgcagcgtcacccggatcttcgccgctacccttgtgggccccccggcgacgcttcctcgtccgcccctaagtcgggaaggttccttgcggttcgcggcgtgccggacgtgacaaacggaagccgcacgactcactagtaccctcgcagacggacagcgccagggagcaatggcagcgcgccgaccgcgatgggctgtggccaatagcggctgctcagcagggcgcgccgagagcagcggccgggaaggggcggtgcgggaggcggggtgtggggcggtagtgtgggccctgttcctgcccgcgcggtgttccgcattctgcaagcctccggagcgcacgtccgtctcaggggagcttgcttgttctttttgcagaagctcagaataaacgctcaactttggccgccacccctgtgtcaaaaggggaggaattgatcaaagagaaccctcatcctaaactgtaccctgagggaactgtcaacaatcaccacttcaaatgcacctcagagggcgagggaaagccctacgaagggacccagacccctcgcattaaggtggtcgaaggcggaccactcccttttgcattcgacatcctggctacctccttcccttacggatcgcgcacttttatcaagtacccgaaggggatcccggacttcttcaagcaatccttccctgagggattcacttgggaacgggtcacgacctacgaagatggaggcgtggtgaccgtgcctcaagacactagcctggaagatggctgccttgtctacaacgtgaagatcagaggtgtgaacttcccatccaatggccccgtgcctcagaaaaagactctggggtgggaagccaataccgaacctctctacccagcggacggaggactcgaaggccggtctgaccctgccctgaagctggtcggaggaggacatttgtcgtgtagctttgtgactacgtaccggtcgaagaagccggccaaaaacctgaagatgccgggtatccacgcggtggaccatagactggaacgcctggaggagagcgataacgagatgttcgtcgttcagagggaacacgctgtggcacgatattgcgatctcccgtcgaagcttggtcacaagctcaattaatgaaaaatctgatcttctgaagaaaatatatttctttttattcatagctcttaactagtggtgatagcaatgtcagcagtgcctttgagttacaatgagacagctggtgaagccacagatgcagctgtctccttgtaactcacaagtaaggttgaccatactctactctagagttgtgttttaatgtatattaatgttactaatgtgtttactagtggtgatagcaatgtcagcagtgccttattctgaccaataaaagcaaggtgaagccacagatgcttgcttttactggtcagaatcaagtaaggttgaccatactctactctaggttatttttagtatgattctgtaaaaatgaattaatactaactagtggtgatagcaatgtcagcagtgcctttttacctgaagaactagcagcgtgaagccacagatggctgctagttattcaggtaaacaagtaaggttgaccatactctactctagtcagttttattgatagtcttttcagtattattgataatcttggggaaaagctggagcctcggtagccgttcctcctgcccgctgggcctcccaacgggccctcctcccctccttgcaccggcccttcctggtctttgaataaatggctaataaaggaaatttattttcattgcaatagtgtgttggaattttttgtgtctctcactcggaaggacatatgggagggcaaatcatttaaaacatcagaatgagtatttggtttagagtttggcaacatatgcccatatgctggctgccatgaacaaaggttggctataaagaggtcatcagtatatgaaacagccccctgctgtccattccttattccatagaaaagccttgacttgaggttagattttttttatattttgttttgtgttatttttttctttaacatccctaaaattttccttacatgttttactagccagatttttcctcctctcctgactactcccagtcatagctgtccctcttctcttatggagatcacctgctcagtcagaaaatctagagcgagctcacggggacagcccccccccaaagcccccagggatgtaattacgtccctcccccgctagggggcagcagcgagccgcccggggctccgctccggtccggcgctccccccgcatccccgagccggcagcgtgcggggacagcccgggcacggggaaggtggcacgggatcgctttcctctgaacgcttctcgctgctctttgagcctgcagacacctggggggatacggggaaaaagctttaggctgaaagagagatttagaatgacagaatcatagaacggcctgggttgcaaaggagcacagtgctcatccagatccaaccccctgctatgtgcagggtcatcaaccagcagcccaggctgcccagagccacatccagcctggccttgaatgcctgcagggatggggcatccacagcctccttgggcaacctgttcagtgcgtcaccaccctctgggggaaaaactgcctcctcatatccaacccaaacctcccctgtctcagtgtaaagccattcccccttgtcctatcaagggggagtttgctgtgacattgttggtctggggtgacacatgtttgccaattcagtgcatcacggagaggcagatcttggggataaggaagtgcaggacagcatggacgtgggacatgctggtgttgagggctctgggacactctccaagtcacagcgttcagaacagccttaaggataagaagataggatagaaggacaaagagcaagttaaaacccagcatggagaggagcacaaaaaggccacagacactgctggtccctgtgtctgagcctgcatgtttgatggtgtctggatgcaagcagaaggggtggaagtgcttgcctggagagatacagctgggtcagtaggactgggacaggcagctggagaattgccatgtagatgttcatacaatcgtcaaatcatgaaggctggaaaagccctccaagatccccaagaccaaccccaacccacccaccgtgcccactggccatgtccctcagtgccacatccccacagttcttcatcacctccagggacggtgacccccccacctccgtgggcagctgtgccactgcagcaccgctctttggagaaggtaaatcttgctaaatccagcccgaccctcccctggcacaacgtaaggccattatctctcatccaactccaggacggagtcagtgagaatattcctagctttgatcaaaaactgaaaataataaaaaaaaactcaactaaaggaacgaaagacaaccgatacagtaaatcataaaaaaagaacaatggataacataaaaataccaataaaacagttgaaattaataatcggaaaaattacataaaaaaaatacgtcaacaatgaggcagggtataacatacccgaaacaggtttgcacacgaatatctcgccggtgtcccgtgccacactgcgatcacgccactatcccctcccgcacgctcctgcctccagctactgagcgcgctagtgttgtcagacgaaaattttataaaatacacaactttaaaattttaccagggtatgagataccctgcctcatgctcgccgggttaa

SEQ ID NO: 547 - DNA, 7716 bp, Artificial sequence
  Synthetic sequence
ttaacccggcgagcatgaggtgaaaaaaagttacatcaagaatgtggcagggtatgacatacccatattttgttgtactataatattgttcttattattatttactcaattatgttgatcttattttgtaaaataatggtttatttaatggcattcaatgaaagaagtttttaattatgaaattattattatttattaatctttttcttaaacacagtaattttagcaacaaacatttagaggtttacaaaaatcaacaatttaacaaaaatattattctttggaatataaatcaacctaatactgaaagataatgagattcttttcattataaaacatataattatttttttaaactaaaaatatgacctagcgcgagctcacggggacagcccccccccaaagcccccagggatgtaattacgtccctcccccgctagggggcagcagcgagccgcccggggctccgctccggtccggcgctccccccgcatccccgagccggcagcgtgcggggacagcccgggcacggggaaggtggcacgggatcgctttcctctgaacgcttctcgctgctctttgagcctgcagacacctggggggatacggggaaaaagctttaggctgaaagagagatttagaatgacagaatcatagaacggcctgggttgcaaaggagcacagtgctcatccagatccaaccccctgctatgtgcagggtcatcaaccagcagcccaggctgcccagagccacatccagcctggccttgaatgcctgcagggatggggcatccacagcctccttgggcaacctgttcagtgcgtcaccaccctctgggggaaaaactgcctcctcatatccaacccaaacctcccctgtctcagtgtaaagccattcccccttgtcctatcaagggggagtttgctgtgacattgttggtctggggtgacacatgtttgccaattcagtgcatcacggagaggcagatcttggggataaggaagtgcaggacagcatggacgtgggacatgctggtgttgagggctctgggacactctccaagtcacagcgttcagaacagccttaaggataagaagataggatagaaggacaaagagcaagttaaaacccagcatggagaggagcacaaaaaggccacagacactgctggtccctgtgtctgagcctgcatgtttgatggtgtctggatgcaagcagaaggggtggaagtgcttgcctggagagatacagctgggtcagtaggactgggacaggcagctggagaattgccatgtagatgttcatacaatcgtcaaatcatgaaggctggaaaagccctccaagatccccaagaccaaccccaacccacccaccgtgcccactggccatgtccctcagtgccacatccccacagttcttcatcacctccagggacggtgacccccccacctccgtgggcagctgtgccactgcagcaccgctctttggagaaggtaaatcttgctaaatccagcccgaccctcccctggcacaacgtaaggccattatctctcatccaactccaggacggagtcagtgagaatattggtaccggggtgtggtgtcttctttctttatgttttaaatgcactgacctcccacattccctttttagtaaaatattcagaaataatttaaatacatcattgcaatgaaaataaatgttttttattaggcagaatccagatgctcaaggcccttcataatatcccccagtttagtagttggacttagggaacaaaggaacctttaatagaaattggacagcaagaaagcgagtcaggcaccgggcttgcgggtcatgcaccaggtgcgcggtccttcgggcacctcgacgtcggcggtgacggtgaagccgagccgctcgtagaaggggaggttgcggggcgcggatgtctccaggaaggcgggcaccccggcgcgctcggccgcctccactccggggagcacgacggcgctgcccagacccttgccctggtggtcgggcgacacgccgacggtggccaggaaccacgcgggctccttgggccggtgcggcgccaggaggccttccatctgttgctgcgcggccagccgggaaccgctcaactcggccatgcgcgggccgatctcggcgaacaccgcccccgcttcgacgctctccggcgtggtccagaccgccaccgcggcgccgtcgtccgcgacccacaccttgccgatgtcgagcccgacgcgcgtgaggaagagttcttgcagctcggtgacccgctcgatgtggcggtccggatcgacggtgtggcgcgtggcggggtagtcggcgaacgcggcggcgagggtgcgtacggccctggggacgtcgtcgcgggtggcgaggcgcaccgtgggcttgtactcggtcatggtggcggacgaaaggcccggagatgaggaagaggagaacagcgcggcagacgtgcgcttttgaagcgtgcagaatgccgggcctccggaggaccttcgggcgcccgccccgcccctgagcccgcccctgagcccgcccccggacccaccccttcccagcctctgagcccagaaagcgaaggagcaaagctgctattggccgctgccccaaaggcctacccgcttccattgctcagcggtgctgtccatctgcacgagactagtgagtcgtgctacttccatttgtcacgtcctgcacgacgcgagctgcggggcgggggggaacttcctgactaggggaggagtagaaggtggcgcgaaggggccaccaaagaacggagccggttggcgcctaccggtggatgtggaatgtgtgcgaggccagaggccacttgtgtagcgccaagtgcccagcggggctgctaaagcgcatgctccagactgccttgggaaaagcgcctcccctacccggtagagaaacttgatctgtcgccgcaattcaaacttcgtgaggctccggtgcccgtcagtggaagactactctggagacggggtccgaatttcaaagtcctttttattgacttacaaggttttcaaggaaaatcttggaagtaactgtgttccgaagaatctacgtttaaaaaccgacccctggatctttgccttgggtccaaggaccgagctggccacgccccagccgcgccgcagccactcccaaggcagttcaagtgttaagcccgaaaggtagagctctgcgcatgtgcacacccgtccatagctgggtcccagccaaccaggccggaggagcacccgcgccgtcacgtgacgtgcccaaccggcgtcgacctataaaaggccgggcgttgacgtcagcggactcttccgccgcagccgccgccatcgtcggcgcgcttccctgttcacctctgtatttgagaatccgacgccatctgccaccaggtgagtgtccgcggcgcggcaagacttggggactgtgacgagacttcggggcagcgggaggtggccggagcgggacccggaaaagaaaggagacatggctgcctctgcatgggtggcgggacgtggtcggctcgcggcgccatatctgcacctcctctgcccgtctttgggagtgtcggcctcctgaagttggagtgttttctctaattccttcgtccagctctcctttccgagaacgctggggtggctgtgggaggggcggcgtttgctgatgtggcagcggacataatgctgtatagccctgtgcccatggtgacagggtgatggtgctcccgggaagtgacagcctgcaggggtggctcacatggtgacctctagtgagctgagcctcttccgccctggcctttatctccttccttggtccgcacaatggaaccggtcccctccaagctgagaaaatggctcatgggcctaggggcctattgtggcctttgatcccagcatttgaccttggcgcacaaggcgggttggcagtgtgtagcaggcgaggttttgtcggcctgtgtgggccccatctcgtgcgggccccctgtcgcctgcattgttggactgctggggtggcagtccagcttggcgttgattacgtggtgcggtcacagcctaggctccctggtactcttgttctagttgtcattttggttagggttgggttcctgacacatctggtgactcttgatgcttcttaggtggtaggcttgtaggtgtgagtcgaatgagcgccagttttggggagacagctctttggaaccccacaatggggtgctatcgacccgagttcccagaatcagtcctgaccgcccttcccccaccacaggtgaacttcgtctcaggggagcttgcttgttctttttgcagaagctcagaataaacgctcaactttggccgccacccctgtgtcaaaaggggaggaattgatcaaagagaaccctcatcctaaactgtaccctgagggaactgtcaacaatcaccacttcaaatgcacctcagagggcgagggaaagccctacgaagggacccagacccctcgcattaaggtggtcgaaggcggaccactcccttttgcattcgacatcctggctacctccttcccttacggatcgcgcacttttatcaagtacccgaaggggatcccggacttcttcaagcaatccttccctgagggattcacttgggaacgggtcacgacctacgaagatggaggcgtggtgaccgtgcctcaagacactagcctggaagatggctgccttgtctacaacgtgaagatcagaggtgtgaacttcccatccaatggccccgtgcctcagaaaaagactctggggtgggaagccaataccgaacctctctacccagcggacggaggactcgaaggccggtctgaccctgccctgaagctggtcggaggaggacatttgtcgtgtagctttgtgactacgtaccggtcgaagaagccggccaaaaacctgaagatgccgggtatccacgcggtggaccatagactggaacgcctggaggagagcgataacgagatgttcgtcgttcagagggaacacgctgtggcacgatattgcgatctcccgtcgaagcttggtcacaagctcaattaatgaaaaatctgatcttctgaagaaaatatatttctttttattcatagctcttaactagtggtgatagcaatgtcagcagtgcctttgagttacaatgagacagctggtgaagccacagatgcagctgtctccttgtaactcacaagtaaggttgaccatactctactctagagttgtgttttaatgtatattaatgttactaatgtgtttactagtggtgatagcaatgtcagcagtgccttattctgaccaataaaagcaaggtgaagccacagatgcttgcttttactggtcagaatcaagtaaggttgaccatactctactctaggttatttttagtatgattctgtaaaaatgaattaatactaactagtggtgatagcaatgtcagcagtgcctttttacctgaagaactagcagcgtgaagccacagatggctgctagttattcaggtaaacaagtaaggttgaccatactctactctagtcagttttattgatagtcttttcagtattattgataatcttggggaaaagctggagcctcggtagccgttcctcctgcccgctgggcctcccaacgggccctcctcccctccttgcaccggcccttcctggtctttgaataaatggctaataaaggaaatttattttcattgcaatagtgtgttggaattttttgtgtctctcactcggaaggacatatgggagggcaaatcatttaaaacatcagaatgagtatttggtttagagtttggcaacatatgcccatatgctggctgccatgaacaaaggttggctataaagaggtcatcagtatatgaaacagccccctgctgtccattccttattccatagaaaagccttgacttgaggttagattttttttatattttgttttgtgttatttttttctttaacatccctaaaattttccttacatgttttactagccagatttttcctcctctcctgactactcccagtcatagctgtccctcttctcttatggagatcacctgctcagtcagaaaatctagagcgagctcacggggacagcccccccccaaagcccccagggatgtaattacgtccctcccccgctagggggcagcagcgagccgcccggggctccgctccggtccggcgctccccccgcatccccgagccggcagcgtgcggggacagcccgggcacggggaaggtggcacgggatcgctttcctctgaacgcttctcgctgctctttgagcctgcagacacctggggggatacggggaaaaagctttaggctgaaagagagatttagaatgacagaatcatagaacggcctgggttgcaaaggagcacagtgctcatccagatccaaccccctgctatgtgcagggtcatcaaccagcagcccaggctgcccagagccacatccagcctggccttgaatgcctgcagggatggggcatccacagcctccttgggcaacctgttcagtgcgtcaccaccctctgggggaaaaactgcctcctcatatccaacccaaacctcccctgtctcagtgtaaagccattcccccttgtcctatcaagggggagtttgctgtgacattgttggtctggggtgacacatgtttgccaattcagtgcatcacggagaggcagatcttggggataaggaagtgcaggacagcatggacgtgggacatgctggtgttgagggctctgggacactctccaagtcacagcgttcagaacagccttaaggataagaagataggatagaaggacaaagagcaagttaaaacccagcatggagaggagcacaaaaaggccacagacactgctggtccctgtgtctgagcctgcatgtttgatggtgtctggatgcaagcagaaggggtggaagtgcttgcctggagagatacagctgggtcagtaggactgggacaggcagctggagaattgccatgtagatgttcatacaatcgtcaaatcatgaaggctggaaaagccctccaagatccccaagaccaaccccaacccacccaccgtgcccactggccatgtccctcagtgccacatccccacagttcttcatcacctccagggacggtgacccccccacctccgtgggcagctgtgccactgcagcaccgctctttggagaaggtaaatcttgctaaatccagcccgaccctcccctggcacaacgtaaggccattatctctcatccaactccaggacggagtcagtgagaatattcctagctttgatcaaaaactgaaaataataaaaaaaaactcaactaaaggaacgaaagacaaccgatacagtaaatcataaaaaaagaacaatggataacataaaaataccaataaaacagttgaaattaataatcggaaaaattacataaaaaaaatacgtcaacaatgaggcagggtataacatacccgaaacaggtttgcacacgaatatctcgccggtgtcccgtgccacactgcgatcacgccactatcccctcccgcacgctcctgcctccagctactgagcgcgctagtgttgtcagacgaaaattttataaaatacacaactttaaaattttaccagggtatgagataccctgcctcatgctcgccgggttaa

SEQ ID NO: 548 - DNA, 2329 bp, Artificial sequence
  Synthetic sequence
tctaccgggtaggggaggcgcttttcccaaggcagtctggagcatgcgctttagcagccccgctgggcacttggcgctacacaagtggcctctggcctcgcacacattccacatccaccggtaggcgccaaccggctccgttctttggtggccccttcgcgccaccttctactcctcccctagtcaggaagttcccccccgccccgcagctcgcgtcgtgcaggacgtgacaaatggaagtagcacgactcactagtctcgtgcagatggacagcaccgctgagcaatggaagcgggtaggcctttggggcagcggccaatagcagctttgctccttcgctttctgggctcaggggcggggcgggcgcccgaaggtcctccggaggcccggcattctgcacgcttcaaaagcgcacgtctgccgcgctgttctcctcttcctcatctccgggcctttcgtccgccaccatggccacctcagcaagttcccacttgaacaaaaacatcaagcaaatgtacctgtgcctgccccagggtgagaaagtccaagccatgtatatctgggttgatggtactggagaaggactgcgctgcaaaacccgcaccctggactgtgagcccaagtgtgtagaagagttacctgagtggaattttgatggctctagtacctttcagtctgagggctccaacagtgacatgtatctcagccctgttgccatgtttcgggaccccttccgccgggagcccaacaagctggtgttctgtgaagttttcaagtacaaccggaagcctgcagagacaaatttaaggcactcctgtaaacggataatggacatggtgagcaaccagcacccctggtttggaatggaacaggagtatactctgatgggaacagatgggcacccttttggttggccttccaatggctttcctgggccccaaggtccgtattactgtggtgtgggcgcagacaaagcctatggcagggatatcgtggaggctcactaccgcgcctgcttgtatgctggggtcaagattacaggaacaaatgctgaggtcatgcctgcccagtgggagttccaaataggaccctgtgaaggaatccacatgggagatcatctctgggtggcccgtttcatcttgcatcgagtatgtgaggactttggggtaatagcaacctttgaccccaagcccattcctgggaactggaatggtgcaggctgccataccaactttagcaccaaggccatgcgggaggagaatggtctgaagcacatcgaggaggccatcgagaaactaagcaagcggcaccagtaccacattcgagcctacgatcccaaggggggcctggacaatgcccgtcgtctgactgggttccacgaaacgtccaacatcaacgacttttctgctggtgtcgccaatcgcagtgccagcatccgcattccccggactgtcggccaggagaagaaaggttactttgaagatcgccgcccctctgccaattgtgacccctttgcagtgacagaagccatcgtccgcacatgccttctcaatgagactggcgacgagcccttccaatacaaaaactaatgatgaatctgatcttctgaagaaaatatatttctttttattcatagctcttaactagtggtgatagcaatgtcagcagtgcctggaaaaacatccattctcattcgtgaagccacagatggaatgagaatagatgtttttcaaagtaaggttgaccatactctactctagttatattctttaggcacgaatgtgtgtttaaaaaaaataaaaactagtggtgatagcaatgtcagcagtgcctttaaattacataatgtggcagtgtgaagccacagatgactgccacatcatgtaatttacaagtaaggttgaccatactctactctagagttgtgttttaatgtatattaatgttactaatgtgtttactagtggtgatagcaatgtcagcagtgccttattttactgtgcatgggcttggtgaagccacagatgcaagcccatgaacagtaaaatcaagtaaggttgaccatactctactctagtcagttttattgatagtcttttcagtattattgataatcttctcgctttcttgctgtccaatttctattaaaggttcctttgttccctaagtccaactactaaactgggggatattatgaagggccttgagcatctggattctgcctaataaaaaacatttattttcattgcaatgatgtatttaaattatttctgaatattttactaaaaagggaatgtgggaggtcagtgcatttaaaacataaagaaa

SEQ ID NO: 549 - DNA, 2326 bp, Artificial sequence
  Synthetic sequence
cactgacgggcaccggagcctcacgaagtttgaattgcggcgacagatcaagtttcctctggagacaatgacggtaaatggcccgcctggcattatgcccagtacatgaccttacgggactttcctacttggcagtacatctacgtattagtcatcgctattaccatgctgatgcggttttggcagtacaccaatgggcgtggatagcggtttgactcacggggatttccaagtctccaccccattgacgtcaatgggagtttgttttggcaccaaaatcaacgggactttccaaaatgtcgtaataaccccgccccgttgacgcaaatgggcggtaggcgtgtacggtgggaggtctatataagcagagctcgtttagtgaaccgtcagatcgcctggagaggccatccacgctgttttgacctccatagtggacaccgggaccgatccagcctccgcgccaccatggccacctcagcaagttcccacttgaacaaaaacatcaagcaaatgtacctgtgcctgccccagggtgagaaagtccaagccatgtatatctgggttgatggtactggagaaggactgcgctgcaaaacccgcaccctggactgtgagcccaagtgtgtagaagagttacctgagtggaattttgatggctctagtacctttcagtctgagggctccaacagtgacatgtatctcagccctgttgccatgtttcgggaccccttccgccgggagcccaacaagctggtgttctgtgaagttttcaagtacaaccggaagcctgcagagacaaatttaaggcactcctgtaaacggataatggacatggtgagcaaccagcacccctggtttggaatggaacaggagtatactctgatgggaacagatgggcacccttttggttggccttccaatggctttcctgggccccaaggtccgtattactgtggtgtgggcgcagacaaagcctatggcagggatatcgtggaggctcactaccgcgcctgcttgtatgctggggtcaagattacaggaacaaatgctgaggtcatgcctgcccagtgggagttccaaataggaccctgtgaaggaatccacatgggagatcatctctgggtggcccgtttcatcttgcatcgagtatgtgaggactttggggtaatagcaacctttgaccccaagcccattcctgggaactggaatggtgcaggctgccataccaactttagcaccaaggccatgcgggaggagaatggtctgaagcacatcgaggaggccatcgagaaactaagcaagcggcaccagtaccacattcgagcctacgatcccaaggggggcctggacaatgcccgtcgtctgactgggttccacgaaacgtccaacatcaacgacttttctgctggtgtcgccaatcgcagtgccagcatccgcattccccggactgtcggccaggagaagaaaggttactttgaagatcgccgcccctctgccaattgtgacccctttgcagtgacagaagccatcgtccgcacatgccttctcaatgagactggcgacgagcccttccaatacaaaaactaatgatgaatctgatcttctgaagaaaatatatttctttttattcatagctcttaactagtggtgatagcaatgtcagcagtgcctggaaaaacatccattctcattcgtgaagccacagatggaatgagaatagatgtttttcaaagtaaggttgaccatactctactctagttatattctttaggcacgaatgtgtgtttaaaaaaaataaaaactagtggtgatagcaatgtcagcagtgcctttaaattacataatgtggcagtgtgaagccacagatgactgccacatcatgtaatttacaagtaaggttgaccatactctactctagagttgtgttttaatgtatattaatgttactaatgtgtttactagtggtgatagcaatgtcagcagtgccttattttactgtgcatgggcttggtgaagccacagatgcaagcccatgaacagtaaaatcaagtaaggttgaccatactctactctagtcagttttattgatagtcttttcagtattattgataatcttctcgctttcttgctgtccaatttctattaaaggttcctttgttccctaagtccaactactaaactgggggatattatgaagggccttgagcatctggattctgcctaataaaaaacatttattttcattgcaatgatgtatttaaattatttctgaatattttactaaaaagggaatgtgggaggtcagtgcatttaaaacataaagaaa

SEQ ID NO: 550 - DNA, 2273 bp, Artificial sequence
  Synthetic sequence
gggtccgaatttcaaagtcctttttattgacttacaaggttttcaaggaaaatcttggaagtaactgtgttccgaagaatctacgtttaaaaaccgacccctggatctttgccttgggtccaaggaccgagctggccacgccccagccgcgccgcagccactcccaaggcagttcaagtgttaagcccgaaaggtagagctctgcgcatgtgcacacccgtccatagctgggtcccagccaaccaggccggaggagcacccgcgccgtcacgtgacgtgcccaaccggcgtcgacctataaaaggccgggcgttgacgtcagcggactcttccgccgcagccgccgccatcgtcggcgcgcttccctgttcacctctgtatttgagaatccgacgccatctgccacgccaccatggccacctcagcaagttcccacttgaacaaaaacatcaagcaaatgtacctgtgcctgccccagggtgagaaagtccaagccatgtatatctgggttgatggtactggagaaggactgcgctgcaaaacccgcaccctggactgtgagcccaagtgtgtagaagagttacctgagtggaattttgatggctctagtacctttcagtctgagggctccaacagtgacatgtatctcagccctgttgccatgtttcgggaccccttccgccgggagcccaacaagctggtgttctgtgaagttttcaagtacaaccggaagcctgcagagacaaatttaaggcactcctgtaaacggataatggacatggtgagcaaccagcacccctggtttggaatggaacaggagtatactctgatgggaacagatgggcacccttttggttggccttccaatggctttcctgggccccaaggtccgtattactgtggtgtgggcgcagacaaagcctatggcagggatatcgtggaggctcactaccgcgcctgcttgtatgctggggtcaagattacaggaacaaatgctgaggtcatgcctgcccagtgggagttccaaataggaccctgtgaaggaatccacatgggagatcatctctgggtggcccgtttcatcttgcatcgagtatgtgaggactttggggtaatagcaacctttgaccccaagcccattcctgggaactggaatggtgcaggctgccataccaactttagcaccaaggccatgcgggaggagaatggtctgaagcacatcgaggaggccatcgagaaactaagcaagcggcaccagtaccacattcgagcctacgatcccaaggggggcctggacaatgcccgtcgtctgactgggttccacgaaacgtccaacatcaacgacttttctgctggtgtcgccaatcgcagtgccagcatccgcattccccggactgtcggccaggagaagaaaggttactttgaagatcgccgcccctctgccaattgtgacccctttgcagtgacagaagccatcgtccgcacatgccttctcaatgagactggcgacgagcccttccaatacaaaaactaatgatgaatctgatcttctgaagaaaatatatttctttttattcatagctcttaactagtggtgatagcaatgtcagcagtgcctggaaaaacatccattctcattcgtgaagccacagatggaatgagaatagatgtttttcaaagtaaggttgaccatactctactctagttatattctttaggcacgaatgtgtgtttaaaaaaaataaaaactagtggtgatagcaatgtcagcagtgcctttaaattacataatgtggcagtgtgaagccacagatgactgccacatcatgtaatttacaagtaaggttgaccatactctactctagagttgtgttttaatgtatattaatgttactaatgtgtttactagtggtgatagcaatgtcagcagtgccttattttactgtgcatgggcttggtgaagccacagatgcaagcccatgaacagtaaaatcaagtaaggttgaccatactctactctagtcagttttattgatagtcttttcagtattattgataatcttctcgctttcttgctgtccaatttctattaaaggttcctttgttccctaagtccaactactaaactgggggatattatgaagggccttgagcatctggattctgcctaataaaaaacatttattttcattgcaatgatgtatttaaattatttctgaatattttactaaaaagggaatgtgggaggtcagtgcatttaaaacataaagaaa

SEQ ID NO: 551 - DNA, 2051 bp, Artificial sequence
  Synthetic sequence
tctaccgggtaggggaggcgcttttcccaaggcagtctggagcatgcgctttagcagccccgctgggcacttggcgctacacaagtggcctctggcctcgcacacattccacatccaccggtaggcgccaaccggctccgttctttggtggccccttcgcgccaccttctactcctcccctagtcaggaagttcccccccgccccgcagctcgcgtcgtgcaggacgtgacaaatggaagtagcacgactcactagtctcgtgcagatggacagcaccgctgagcaatggaagcgggtaggcctttggggcagcggccaatagcagctttgctccttcgctttctgggctcaggggcggggcgggcgcccgaaggtcctccggaggcccggcattctgcacgcttcaaaagcgcacgtctgccgcgctgttctcctcttcctcatctccgggcctttcgtccgccaccatggccacctcagcaagttcccacttgaacaaaaacatcaagcaaatgtacctgtgcctgccccagggtgagaaagtccaagccatgtatatctgggttgatggtactggagaaggactgcgctgcaaaacccgcaccctggactgtgagcccaagtgtgtagaagagttacctgagtggaattttgatggctctagtacctttcagtctgagggctccaacagtgacatgtatctcagccctgttgccatgtttcgggaccccttccgccgggagcccaacaagctggtgttctgtgaagttttcaagtacaaccggaagcctgcagagacaaatttaaggcactcctgtaaacggataatggacatggtgagcaaccagcacccctggtttggaatggaacaggagtatactctgatgggaacagatgggcacccttttggttggccttccaatggctttcctgggccccaaggtccgtattactgtggtgtgggcgcagacaaagcctatggcagggatatcgtggaggctcactaccgcgcctgcttgtatgctggggtcaagattacaggaacaaatgctgaggtcatgcctgcccagtgggagttccaaataggaccctgtgaaggaatccacatgggagatcatctctgggtggcccgtttcatcttgcatcgagtatgtgaggactttggggtaatagcaacctttgaccccaagcccattcctgggaactggaatggtgcaggctgccataccaactttagcaccaaggccatgcgggaggagaatggtctgaagcacatcgaggaggccatcgagaaactaagcaagcggcaccagtaccacattcgagcctacgatcccaaggggggcctggacaatgcccgtcgtctgactgggttccacgaaacgtccaacatcaacgacttttctgctggtgtcgccaatcgcagtgccagcatccgcattccccggactgtcggccaggagaagaaaggttactttgaagatcgccgcccctctgccaattgtgacccctttgcagtgacagaagccatcgtccgcacatgccttctcaatgagactggcgacgagcccttccaatacaaaaactaatgatgaatctgatcttctgaagaaaatatatttctttttattcatagctcttaactagtggtgatagcaatgtcagcagtgcctggaaaaacatccattctcattcgtgaagccacagatggaatgagaatagatgtttttcaaagtaaggttgaccatactctactctagagttgtgttttaatgtatattaatgttactaatgtgttttcagttttattgatagtcttttcagtattattgataatcttctcgctttcttgctgtccaatttctattaaaggttcctttgttccctaagtccaactactaaactgggggatattatgaagggccttgagcatctggattctgcctaataaaaaacatttattttcattgcaatgatgtatttaaattatttctgaatattttactaaaaagggaatgtgggaggtcagtgcatttaaaacataaagaaa

SEQ ID NO: 552 - DNA, 2211 bp, Artificial sequence
  Synthetic sequence
tctaccgggtaggggaggcgcttttcccaaggcagtctggagcatgcgctttagcagccccgctgggcacttggcgctacacaagtggcctctggcctcgcacacattccacatccaccggtaggcgccaaccggctccgttctttggtggccccttcgcgccaccttctactcctcccctagtcaggaagttcccccccgccccgcagctcgcgtcgtgcaggacgtgacaaatggaagtagcacgactcactagtctcgtgcagatggacagcaccgctgagcaatggaagcgggtaggcctttggggcagcggccaatagcagctttgctccttcgctttctgggctcaggggcggggcgggcgcccgaaggtcctccggaggcccggcattctgcacgcttcaaaagcgcacgtctgccgcgctgttctcctcttcctcatctccgggcctttcgtccgccaccatggccacctcagcaagttcccacttgaacaaaaacatcaagcaaatgtacctgtgcctgccccagggtgagaaagtccaagccatgtatatctgggttgatggtactggagaaggactgcgctgcaaaacccgcaccctggactgtgagcccaagtgtgtagaagagttacctgagtggaattttgatggctctagtacctttcagtctgagggctccaacagtgacatgtatctcagccctgttgccatgtttcgggaccccttccgccgggagcccaacaagctggtgttctgtgaagttttcaagtacaaccggaagcctgcagagacaaatttaaggcactcctgtaaacggataatggacatggtgagcaaccagcacccctggtttggaatggaacaggagtatactctgatgggaacagatgggcacccttttggttggccttccaatggctttcctgggccccaaggtccgtattactgtggtgtgggcgcagacaaagcctatggcagggatatcgtggaggctcactaccgcgcctgcttgtatgctggggtcaagattacaggaacaaatgctgaggtcatgcctgcccagtgggagttccaaataggaccctgtgaaggaatccacatgggagatcatctctgggtggcccgtttcatcttgcatcgagtatgtgaggactttggggtaatagcaacctttgaccccaagcccattcctgggaactggaatggtgcaggctgccataccaactttagcaccaaggccatgcgggaggagaatggtctgaagcacatcgaggaggccatcgagaaactaagcaagcggcaccagtaccacattcgagcctacgatcccaaggggggcctggacaatgcccgtcgtctgactgggttccacgaaacgtccaacatcaacgacttttctgctggtgtcgccaatcgcagtgccagcatccgcattccccggactgtcggccaggagaagaaaggttactttgaagatcgccgcccctctgccaattgtgacccctttgcagtgacagaagccatcgtccgcacatgccttctcaatgagactggcgacgagcccttccaatacaaaaactaatgatgaatctgatcttctgaagaaaatatatttctttttattcatagctcttaactagtggtgatagcaatgtcagcagtgcctggaaaaacatccattctcattcgtgaagccacagatggaatgagaatagatgtttttcaaagtaaggttgaccatactctactctagttatattctttaggcacgaatgtgtgtttaaaaaaaataaaaactagtggtgatagcaatgtcagcagtgcctttaaattacataatgtggcagtgtgaagccacagatgactgccacatcatgtaatttacaagtaaggttgaccatactctactctagagttgtgttttaatgtatattaatgttactaatgtgttttcagttttattgatagtcttttcagtattattgataatcttctcgctttcttgctgtccaatttctattaaaggttcctttgttccctaagtccaactactaaactgggggatattatgaagggccttgagcatctggattctgcctaataaaaaacatttattttcattgcaatgatgtatttaaattatttctgaatattttactaaaaagggaatgtgggaggtcagtgcatttaaaacataaagaaa

SEQ ID NO: 553 - DNA, 2516 bp, Artificial sequence
  Synthetic sequence
tctaccgggtaggggaggcgcttttcccaaggcagtctggagcatgcgctttagcagccccgctgggcacttggcgctacacaagtggcctctggcctcgcacacattccacatccaccggtaggcgccaaccggctccgttctttggtggccccttcgcgccaccttctactcctcccctagtcaggaagttcccccccgccccgcagctcgcgtcgtgcaggacgtgacaaatggaagtagcacgactcactagtctcgtgcagatggacagcaccgctgagcaatggaagcgggtaggcctttggggcagcggccaatagcagctttgctccttcgctttctgggctcaggggcggggcgggcgcccgaaggtcctccggaggcccggcattctgcacgcttcaaaagcgcacgtctgccgcgctgttctcctcttcctcatctccgggcctttcgtcggacacaagacaggcttgcgccaccatggttgagaataccactttatcccgcgtcagggagaggcagtgcgtaaaaagacgcggaaccatgtgaaatactggtttttagtgcgccagatctctataatctcgcgcaacctattttcccctcgaacactttttaagccgtagataaacaggctgggacacttcacatggccacctcagcaagttcccacttgaacaaaaacatcaagcaaatgtacctgtgcctgccccagggtgagaaagtccaagccatgtatatctgggttgatggtactggagaaggactgcgctgcaaaacccgcaccctggactgtgagcccaagtgtgtagaagagttacctgagtggaattttgatggctctagtacctttcagtctgagggctccaacagtgacatgtatctcagccctgttgccatgtttcgggaccccttccgccgggagcccaacaagctggtgttctgtgaagttttcaagtacaaccggaagcctgcagagacaaatttaaggcactcctgtaaacggataatggacatggtgagcaaccagcacccctggtttggaatggaacaggagtatactctgatgggaacagatgggcacccttttggttggccttccaatggctttcctgggccccaaggtccgtattactgtggtgtgggcgcagacaaagcctatggcagggatatcgtggaggctcactaccgcgcctgcttgtatgctggggtcaagattacaggaacaaatgctgaggtcatgcctgcccagtgggagttccaaataggaccctgtgaaggaatccacatgggagatcatctctgggtggcccgtttcatcttgcatcgagtatgtgaggactttggggtaatagcaacctttgaccccaagcccattcctgggaactggaatggtgcaggctgccataccaactttagcaccaaggccatgcgggaggagaatggtctgaagcacatcgaggaggccatcgagaaactaagcaagcggcaccagtaccacattcgagcctacgatcccaaggggggcctggacaatgcccgtcgtctgactgggttccacgaaacgtccaacatcaacgacttttctgctggtgtcgccaatcgcagtgccagcatccgcattccccggactgtcggccaggagaagaaaggttactttgaagatcgccgcccctctgccaattgtgacccctttgcagtgacagaagccatcgtccgcacatgccttctcaatgagactggcgacgagcccttccaatacaaaaactaatgatgaatctgatcttctgaagaaaatatatttctttttattcatagctcttaactagtggtgatagcaatgtcagcagtgcctggaaaaacatccattctcattcgtgaagccacagatggaatgagaatagatgtttttcaaagtaaggttgaccatactctactctagttatattctttaggcacgaatgtgtgtttaaaaaaaataaaaactagtggtgatagcaatgtcagcagtgcctttaaattacataatgtggcagtgtgaagccacagatgactgccacatcatgtaatttacaagtaaggttgaccatactctactctagagttgtgttttaatgtatattaatgttactaatgtgtttactagtggtgatagcaatgtcagcagtgccttattttactgtgcatgggcttggtgaagccacagatgcaagcccatgaacagtaaaatcaagtaaggttgaccatactctactctagtcagttttattgatagtcttttcagtattattgataatcttctcgctttcttgctgtccaatttctattaaaggttcctttgttccctaagtccaactactaaactgggggatattatgaagggccttgagcatctggattctgcctaataaaaaacatttattttcattgcaatgatgtatttaaattatttctgaatattttactaaaaagggaatgtgggaggtcagtgcatttaaaacataaagaaa

SEQ ID NO: 554 - DNA, 2514 bp, Artificial sequence
  Synthetic sequence
tctaccgggtaggggaggcgcttttcccaaggcagtctggagcatgcgctttagcagccccgctgggcacttggcgctacacaagtggcctctggcctcgcacacattccacatccaccggtaggcgccaaccggctccgttctttggtggccccttcgcgccaccttctactcctcccctagtcaggaagttcccccccgccccgcagctcgcgtcgtgcaggacgtgacaaatggaagtagcacgactcactagtctcgtgcagatggacagcaccgctgagcaatggaagcgggtaggcctttggggcagcggccaatagcagctttgctccttcgctttctgggctcaggggcggggcgggcgcccgaaggtcctccggaggcccggcattctgcacgcttcaaaagcgcacgtctgccgcgctgttctcctcttcctcatctccgggcctttcgtcggacacaagacaggcttgcgccaccatggttgagaataccactttatcccgcgtcagggagaggcagtgcgtaaaaagacgcggaaccatgtgaaatactggtttttagtgcgccagatctctataatctcgcgcaacctattttcccctcgaacactttttaagccgtagataaacaggctgggattttttatggccacctcagcaagttcccacttgaacaaaaacatcaagcaaatgtacctgtgcctgccccagggtgagaaagtccaagccatgtatatctgggttgatggtactggagaaggactgcgctgcaaaacccgcaccctggactgtgagcccaagtgtgtagaagagttacctgagtggaattttgatggctctagtacctttcagtctgagggctccaacagtgacatgtatctcagccctgttgccatgtttcgggaccccttccgccgggagcccaacaagctggtgttctgtgaagttttcaagtacaaccggaagcctgcagagacaaatttaaggcactcctgtaaacggataatggacatggtgagcaaccagcacccctggtttggaatggaacaggagtatactctgatgggaacagatgggcacccttttggttggccttccaatggctttcctgggccccaaggtccgtattactgtggtgtgggcgcagacaaagcctatggcagggatatcgtggaggctcactaccgcgcctgcttgtatgctggggtcaagattacaggaacaaatgctgaggtcatgcctgcccagtgggagttccaaataggaccctgtgaaggaatccacatgggagatcatctctgggtggcccgtttcatcttgcatcgagtatgtgaggactttggggtaatagcaacctttgaccccaagcccattcctgggaactggaatggtgcaggctgccataccaactttagcaccaaggccatgcgggaggagaatggtctgaagcacatcgaggaggccatcgagaaactaagcaagcggcaccagtaccacattcgagcctacgatcccaaggggggcctggacaatgcccgtcgtctgactgggttccacgaaacgtccaacatcaacgacttttctgctggtgtcgccaatcgcagtgccagcatccgcattccccggactgtcggccaggagaagaaaggttactttgaagatcgccgcccctctgccaattgtgacccctttgcagtgacagaagccatcgtccgcacatgccttctcaatgagactggcgacgagcccttccaatacaaaaactaatgatgaatctgatcttctgaagaaaatatatttctttttattcatagctcttaactagtggtgatagcaatgtcagcagtgcctggaaaaacatccattctcattcgtgaagccacagatggaatgagaatagatgtttttcaaagtaaggttgaccatactctactctagttatattctttaggcacgaatgtgtgtttaaaaaaaataaaaactagtggtgatagcaatgtcagcagtgcctttaaattacataatgtggcagtgtgaagccacagatgactgccacatcatgtaatttacaagtaaggttgaccatactctactctagagttgtgttttaatgtatattaatgttactaatgtgtttactagtggtgatagcaatgtcagcagtgccttattttactgtgcatgggcttggtgaagccacagatgcaagcccatgaacagtaaaatcaagtaaggttgaccatactctactctagtcagttttattgatagtcttttcagtattattgataatcttctcgctttcttgctgtccaatttctattaaaggttcctttgttccctaagtccaactactaaactgggggatattatgaagggccttgagcatctggattctgcctaataaaaaacatttattttcattgcaatgatgtatttaaattatttctgaatattttactaaaaagggaatgtgggaggtcagtgcatttaaaacataaagaaa

SEQ ID NO: 555 - DNA, 2270 bp, Artificial sequence
  Synthetic sequence
cagctgcttcatccccgtggcccgttgctcgcgtttgctggcggtgtccccggaagaaatatatttgcatgtctttagttctatgatgacacaaaccccgcccagcgtcttgtcattggcgaaaacacgcagatgcagtcggggcggcgcggtcccaggtccacttcgcatattaaggtgacgcgtgtggcctcgaacacagagcgactctgcagggacacaagacaggcttgcgccaccatggttgagaataccactttatcccgcgtcagggagaggcagtgcgtaaaaagacgcggaaccatgtgaaatactggtttttagtgcgccagatctctataatctcgcgcaacctattttcccctcgaacactttttaagccgtagataaacaggctgggacacttcacatggccacctcagcaagttcccacttgaacaaaaacatcaagcaaatgtacctgtgcctgccccagggtgagaaagtccaagccatgtatatctgggttgatggtactggagaaggactgcgctgcaaaacccgcaccctggactgtgagcccaagtgtgtagaagagttacctgagtggaattttgatggctctagtacctttcagtctgagggctccaacagtgacatgtatctcagccctgttgccatgtttcgggaccccttccgccgggagcccaacaagctggtgttctgtgaagttttcaagtacaaccggaagcctgcagagacaaatttaaggcactcctgtaaacggataatggacatggtgagcaaccagcacccctggtttggaatggaacaggagtatactctgatgggaacagatgggcacccttttggttggccttccaatggctttcctgggccccaaggtccgtattactgtggtgtgggcgcagacaaagcctatggcagggatatcgtggaggctcactaccgcgcctgcttgtatgctggggtcaagattacaggaacaaatgctgaggtcatgcctgcccagtgggagttccaaataggaccctgtgaaggaatccacatgggagatcatctctgggtggcccgtttcatcttgcatcgagtatgtgaggactttggggtaatagcaacctttgaccccaagcccattcctgggaactggaatggtgcaggctgccataccaactttagcaccaaggccatgcgggaggagaatggtctgaagcacatcgaggaggccatcgagaaactaagcaagcggcaccagtaccacattcgagcctacgatcccaaggggggcctggacaatgcccgtcgtctgactgggttccacgaaacgtccaacatcaacgacttttctgctggtgtcgccaatcgcagtgccagcatccgcattccccggactgtcggccaggagaagaaaggttactttgaagatcgccgcccctctgccaattgtgacccctttgcagtgacagaagccatcgtccgcacatgccttctcaatgagactggcgacgagcccttccaatacaaaaactaatgatgaatctgatcttctgaagaaaatatatttctttttattcatagctcttaactagtggtgatagcaatgtcagcagtgcctggaaaaacatccattctcattcgtgaagccacagatggaatgagaatagatgtttttcaaagtaaggttgaccatactctactctagttatattctttaggcacgaatgtgtgtttaaaaaaaataaaaactagtggtgatagcaatgtcagcagtgcctttaaattacataatgtggcagtgtgaagccacagatgactgccacatcatgtaatttacaagtaaggttgaccatactctactctagagttgtgttttaatgtatattaatgttactaatgtgtttactagtggtgatagcaatgtcagcagtgccttattttactgtgcatgggcttggtgaagccacagatgcaagcccatgaacagtaaaatcaagtaaggttgaccatactctactctagtcagttttattgatagtcttttcagtattattgataatcttctcgctttcttgctgtccaatttctattaaaggttcctttgttccctaagtccaactactaaactgggggatattatgaagggccttgagcatctggattctgcctaataaaaaacatttattttcattgcaatgatgtatttaaattatttctgaatattttactaaaaagggaatgtgggaggtcagtgcatttaaaacataaagaaa

SEQ ID NO: 556 - DNA, 2153 bp, Artificial sequence
  Synthetic sequence
ttggcgaaaacacgcagatgcagtcggggcggcgcggtcccaggtccacttcgcatattaaggtgacgcgtgtggcctcgaacacagagcgactctgcagggacacaagacaggcttgcgccaccatggttgagaataccactttatcccgcgtcagggagaggcagtgcgtaaaaagacgcggaaccatgtgaaatactggtttttagtgcgccagatctctataatctcgcgcaacctattttcccctcgaacactttttaagccgtagataaacaggctgggattttttatggccacctcagcaagttcccacttgaacaaaaacatcaagcaaatgtacctgtgcctgccccagggtgagaaagtccaagccatgtatatctgggttgatggtactggagaaggactgcgctgcaaaacccgcaccctggactgtgagcccaagtgtgtagaagagttacctgagtggaattttgatggctctagtacctttcagtctgagggctccaacagtgacatgtatctcagccctgttgccatgtttcgggaccccttccgccgggagcccaacaagctggtgttctgtgaagttttcaagtacaaccggaagcctgcagagacaaatttaaggcactcctgtaaacggataatggacatggtgagcaaccagcacccctggtttggaatggaacaggagtatactctgatgggaacagatgggcacccttttggttggccttccaatggctttcctgggccccaaggtccgtattactgtggtgtgggcgcagacaaagcctatggcagggatatcgtggaggctcactaccgcgcctgcttgtatgctggggtcaagattacaggaacaaatgctgaggtcatgcctgcccagtgggagttccaaataggaccctgtgaaggaatccacatgggagatcatctctgggtggcccgtttcatcttgcatcgagtatgtgaggactttggggtaatagcaacctttgaccccaagcccattcctgggaactggaatggtgcaggctgccataccaactttagcaccaaggccatgcgggaggagaatggtctgaagcacatcgaggaggccatcgagaaactaagcaagcggcaccagtaccacattcgagcctacgatcccaaggggggcctggacaatgcccgtcgtctgactgggttccacgaaacgtccaacatcaacgacttttctgctggtgtcgccaatcgcagtgccagcatccgcattccccggactgtcggccaggagaagaaaggttactttgaagatcgccgcccctctgccaattgtgacccctttgcagtgacagaagccatcgtccgcacatgccttctcaatgagactggcgacgagcccttccaatacaaaaactaatgatgaatctgatcttctgaagaaaatatatttctttttattcatagctcttaactagtggtgatagcaatgtcagcagtgcctggaaaaacatccattctcattcgtgaagccacagatggaatgagaatagatgtttttcaaagtaaggttgaccatactctactctagttatattctttaggcacgaatgtgtgtttaaaaaaaataaaaactagtggtgatagcaatgtcagcagtgcctttaaattacataatgtggcagtgtgaagccacagatgactgccacatcatgtaatttacaagtaaggttgaccatactctactctagagttgtgttttaatgtatattaatgttactaatgtgtttactagtggtgatagcaatgtcagcagtgccttattttactgtgcatgggcttggtgaagccacagatgcaagcccatgaacagtaaaatcaagtaaggttgaccatactctactctagtcagttttattgatagtcttttcagtattattgataatcttctcgctttcttgctgtccaatttctattaaaggttcctttgttccctaagtccaactactaaactgggggatattatgaagggccttgagcatctggattctgcctaataaaaaacatttattttcattgcaatgatgtatttaaattatttctgaatattttactaaaaagggaatgtgggaggtcagtgcatttaaaacataaagaaa

SEQ ID NO: 557 - DNA, 2577 bp, Artificial sequence
  Synthetic sequence
tctaccgggtaggggaggcgcttttcccaaggcagtctggagcatgcgctttagcagccccgctgggcacttggcgctacacaagtggcctctggcctcgcacacattccacatccaccggtaggcgccaaccggctccgttctttggtggccccttcgcgccaccttctactcctcccctagtcaggaagttcccccccgccccgcagctcgcgtcgtgcaggacgtgacaaatggaagtagcacgactcactagtctcgtgcagatggacagcaccgctgagcaatggaagcgggtaggcctttggggcagcggccaatagcagctttgctccttcgctttctgggctcaggggcggggcgggcgcccgaaggtcctccggaggcccggcattctgcacgcttcaaaagcgcacgtctgccgcgctgttctcctcttcctcatctccgggcctttcgtcggacacaagacaggcttgcgccaccatggttgagaataccactttatcccgcgtcagggagaggcagtgcgtaaaaagacgcggaaccatgtgaaatactggtttttagtgcgccagatctctataatctcgcgcaacctattttcccctcgaacactttttaagccgtagataaacaggctgggattttttatggccacctcagcaagttcccacttgaacaaaaacatcaagcaaatgtacctgtgcctgccccagggtgagaaagtccaagccatgtatatctgggttgatggtactggagaaggactgcgctgcaaaacccgcaccctggactgtgagcccaagtgtgtagaagagttacctgagtggaattttgatggctctagtacctttcagtctgagggctccaacagtgacatgtatctcagccctgttgccatgtttcgggaccccttccgccgggagcccaacaagctggtgttctgtgaagttttcaagtacaaccggaagcctgcagagacaaatttaaggcactcctgtaaacggataatggacatggtgagcaaccagcacccctggtttggaatggaacaggagtatactctgatgggaacagatgggcacccttttggttggccttccaatggctttcctgggccccaaggtccgtattactgtggtgtgggcgcagacaaagcctatggcagggatatcgtggaggctcactaccgcgcctgcttgtatgctggggtcaagattacaggaacaaatgctgaggtcatgcctgcccagtgggagttccaaataggaccctgtgaaggaatccacatgggagatcatctctgggtggcccgtttcatcttgcatcgagtatgtgaggactttggggtaatagcaacctttgaccccaagcccattcctgggaactggaatggtgcaggctgccataccaactttagcaccaaggccatgcgggaggagaatggtctgaagcacatcgaggaggccatcgagaaactaagcaagcggcaccagtaccacattcgagcctacgatcccaaggggggcctggacaatgcccgtcgtctgactgggttccacgaaacgtccaacatcaacgacttttctgctggtgtcgccaatcgcagtgccagcatccgcattccccggactgtcggccaggagaagaaaggttactttgaagatcgccgcccctctgccaattgtgacccctttgcagtgacagaagccatcgtccgcacatgccttctcaatgagactggcgacgagcccttccaatacaaaaactggatccgctcagacatgataagatacattgatgagtttggacaaaccacaactagaatgcagtgatgatgaatctgatcttctgaagaaaatatatttctttttattcatagctcttaactagtggtgatagcaatgtcagcagtgcctggaaaaacatccattctcattcgtgaagccacagatggaatgagaatagatgtttttcaaagtaaggttgaccatactctactctagttatattctttaggcacgaatgtgtgtttaaaaaaaataaaaactagtggtgatagcaatgtcagcagtgcctttaaattacataatgtggcagtgtgaagccacagatgactgccacatcatgtaatttacaagtaaggttgaccatactctactctagagttgtgttttaatgtatattaatgttactaatgtgtttactagtggtgatagcaatgtcagcagtgccttattttactgtgcatgggcttggtgaagccacagatgcaagcccatgaacagtaaaatcaagtaaggttgaccatactctactctagtcagttttattgatagtcttttcagtattattgataatcttctcgctttcttgctgtccaatttctattaaaggttcctttgttccctaagtccaactactaaactgggggatattatgaagggccttgagcatctggattctgcctaataaaaaacatttattttcattgcaatgatgtatttaaattatttctgaatattttactaaaaagggaatgtgggaggtcagtgcatttaaaacataaagaaa

SEQ ID NO: 558 - DNA, 500 bp, Artificial sequence
  Synthetic sequence
ttagactttgagtgatcttgagcctttcctagttcatcccaccccgccccagctgtctcattgtaactcaaaggatggaatatcaaggtctttttattcctcgtgcccagttaatcttgcttttattggtcagaatagaggagtcaagttcttaatccctatacacccaaccctcatttcttttctatttagctttctagtgggggtgggaggggtaggggaagggaacgtaaccactgcttcatctcatcaggaatgcatgtccagtaggcagagctgccacagagcgggtgtatttgtggaggaggactttttcttcaggacagttaaaagagcaggtccactgcttggattgacaattcccctataggtagagagctgctagttcttcaggtaaaaccaactttctattccaaatggaagttaggtgaggagtagtgggaggagttcatgccctccatgaagacagctcagtgtatcacctgacagatgggtagccc

SEQ ID NO: 559 - DNA, 350 bp, Artificial sequence
  Synthetic sequence
cagctgtctcattgtaactcaaaggatggaatatcaaggtctttttattcctcgtgcccagttaatcttgcttttattggtcagaatagaggagtcaagttcttaatccctatacacccaaccctcatttcttttctatttagctttctagtgggggtgggaggggtaggggaagggaacgtaaccactgcttcatctcatcaggaatgcatgtccagtaggcagagctgccacagagcgggtgtatttgtggaggaggactttttcttcaggacagttaaaagagcaggtccactgcttggattgacaattcccctataggtagagagctgctagttcttcaggtaaaa

SEQ ID NO: 560 - DNA, 299 bp, Artificial sequence
  Synthetic sequence
caagcccatgcacagtaaaataatgtactcacacataacatacaaatggattattttctactttgccctttaaatattctgtccccatgaaacaaacactgccacattatgtaatttaagtgacacagacgttttgtgtgagacttcaaacatggtgcctatatctgagagacctctgtgatttactgagaagatgagaacagctcccttctgtggggaagttggttcttagtcagtggtggactggccactgaattcactgcaatcaacagattcagaatgagaatggatgtttttcc

SEQ ID NO: 561 - DNA, 420 bp, Artificial sequence
  Synthetic sequence
atttagttcagaccatctcagccaagcagaagacccagactaacatatggttcattgacagacatgctccgcaccaagagcaagtgggaaccctcagatgctgcactggtggaacgcctctttgtgaagggctgctgtgccctcaagcccatgcacagtaaaataatgtactcacacataacatacaaatggattattttctactttgccctttaaatattctgtccccatgaaacaaacactgccacattatgtaatttaagtgacacagacgttttgtgtgagacttcaaacatggtgcctatatctgagagacctctgtgatttactgagaagatgagaacagctcccttctgtggggaagttggttcttagtcagtggtggactggccactgaattcactgcaatcaacagattca

SEQ ID NO: 562 - DNA, 2248 bp, Artificial sequence
  Synthetic sequence
cagctgcttcatccccgtggcccgttgctcgcgtttgctggcggtgtccccggaagaaatatatttgcatgtctttagttctatgatgacacaaaccccgcccagcgtcttgtcattggcgaaaacacgcagatgcagtcggggcggcgcggtcccaggtccacttcgcatattaaggtgacgcgtgtggcctcgaacacagagcgactctgcagggtggcatggccacctcagcaagttcccacttgaacaaaaacatcaagcaaatgtacctgtgcctgccccagggtgagaaagtccaagccatgtatatctgggttgatggtactggagaaggactgcgctgcaaaacccgcaccctggactgtgagcccaagtgtgtagaagagttacctgagtggaattttgatggctctagtacctttcagtctgagggctccaacagtgacatgtatctcagccctgttgccatgtttcgggaccccttccgccgggagcccaacaagctggtgttctgtgaagttttcaagtacaaccggaagcctgcagagacaaatttaaggcactcctgtaaacggataatggacatggtgagcaaccagcacccctggtttggaatggaacaggagtatactctgatgggaacagatgggcacccttttggttggccttccaatggctttcctgggccccaaggtccgtattactgtggtgtgggcgcagacaaagcctatggcagggatatcgtggaggctcactaccgcgcctgcttgtatgctggggtcaagattacaggaacaaatgctgaggtcatgcctgcccagtgggagttccaaataggaccctgtgaaggaatccacatgggagatcatctctgggtggcccgtttcatcttgcatcgagtatgtgaggactttggggtaatagcaacctttgaccccaagcccattcctgggaactggaatggtgcaggctgccataccaactttagcaccaaggccatgcgggaggagaatggtctgaagcacatcgaggaggccatcgagaaactaagcaagcggcaccagtaccacattcgagcctacgatcccaaggggggcctggacaatgcccgtcgtctgactgggttccacgaaacgtccaacatcaacgacttttctgctggtgtcgccaatcgcagtgccagcatccgcattccccggactgtcggccaggagaagaaaggttactttgaagatcgccgcccctctgccaattgtgacccctttgcagtgacagaagccatcgtccgcacatgccttctcaatgagactggcgacgagcccttccaatacaaaaactaataattagactttgagtgatcttgagcctttcctagttcatcccaccccgccccagagagatctttgtgaaggaaccttacttctgtggtgtgacataattggacaaactacctacagagatttaaagctctaaggtaaatataaaatttttaagtgtataatgtgttaaactactgattctaattgtttgtgtattttagattccaacctatggaactgatgaatgggagcagtggtggaatgcctttaatgaggaaaacctgttttgctcagaagaaatgccatctagtgatgatgaggctactgctgactctcaacattctactcctccaaaaaagaagagaaaggtagaagatcccaaggactttccttcagaattgctaagttttttgagtcatgctgtgtttagtaatagaactcttgcttgctttgctatttacaccacaaaggaaaaagctgcactgctatacaagaaaattatggaaaaatattctgtaacctttataagtaggcataacagttataatcataacatactgttttttcttactccacacaggcatagagtgtctgctattaataactatgctcaaaaattgtgtacctttagctttttaatttgtaaaggggttaataaggaatatttgatgtatagtgccttgactagagatcataatcagccataccacatttgtagaggttttacttgctttaaaaaacctcccacacctccccctgaacctgaaacataaaatgaatgcaattgttgttgttaacttgtttattgcagcttataatggttacaaataaagcaatagcatcacaaatttcacaaataaagcatttttttcactgcattctagttgtggtttgtccaaactcatcaatgtatcttatcatgtctg

SEQ ID NO: 563 - DNA, 1945 bp, Artificial sequence
  Synthetic sequence
cagctgcttcatccccgtggcccgttgctcgcgtttgctggcggtgtccccggaagaaatatatttgcatgtctttagttctatgatgacacaaaccccgcccagcgtcttgtcattggcgaaaacacgcagatgcagtcggggcggcgcggtcccaggtccacttcgcatattaaggtgacgcgtgtggcctcgaacacagagcgactctgcagggtggcatggccacctcagcaagttcccacttgaacaaaaacatcaagcaaatgtacctgtgcctgccccagggtgagaaagtccaagccatgtatatctgggttgatggtactggagaaggactgcgctgcaaaacccgcaccctggactgtgagcccaagtgtgtagaagagttacctgagtggaattttgatggctctagtacctttcagtctgagggctccaacagtgacatgtatctcagccctgttgccatgtttcgggaccccttccgccgggagcccaacaagctggtgttctgtgaagttttcaagtacaaccggaagcctgcagagacaaatttaaggcactcctgtaaacggataatggacatggtgagcaaccagcacccctggtttggaatggaacaggagtatactctgatgggaacagatgggcacccttttggttggccttccaatggctttcctgggccccaaggtccgtattactgtggtgtgggcgcagacaaagcctatggcagggatatcgtggaggctcactaccgcgcctgcttgtatgctggggtcaagattacaggaacaaatgctgaggtcatgcctgcccagtgggagttccaaataggaccctgtgaaggaatccacatgggagatcatctctgggtggcccgtttcatcttgcatcgagtatgtgaggactttggggtaatagcaacctttgaccccaagcccattcctgggaactggaatggtgcaggctgccataccaactttagcaccaaggccatgcgggaggagaatggtctgaagcacatcgaggaggccatcgagaaactaagcaagcggcaccagtaccacattcgagcctacgatcccaaggggggcctggacaatgcccgtcgtctgactgggttccacgaaacgtccaacatcaacgacttttctgctggtgtcgccaatcgcagtgccagcatccgcattccccggactgtcggccaggagaagaaaggttactttgaagatcgccgcccctctgccaattgtgacccctttgcagtgacagaagccatcgtccgcacatgccttctcaatgagactggcgacgagcccttccaatacaaaaactggatccgctcagacatgataagatacattgatgagtttggacaaaccacaactagaatgcagtgataattagactttgagtgatcttgagcctttcctagttcatcccaccccgccccagagagatctttgtgaaggaaccttacttctgtggtgtgacataattggacaaactacctacagagatttaaagctctaaggtaaatataaaatttttaagtgtataatgtgttaaactactgattctaattgtttgtgtattttagattccaacctatggaactgatgaatgggagcagtggtggaatgcctttaatgaggaaaacctgttttgctcagaagaaatgccatctagtgatgatgaggctactgctgactctcaacattctactcctctcgctttcttgctgtccaatttctattaaaggttcctttgttccctaagtccaactactaaactgggggatattatgaagggccttgagcatctggattctgcctaataaaaaacatttattttcattgcaatgatgtatttaaattatttctgaatattttactaaaaagggaatgtgggaggtcagtgcatttaaaacataaagaaa

SEQ ID NO: 564 - DNA, 15 bp, Artificial sequence
  Synthetic sequence
ccctcrtattatgtt

SEQ ID NO: 565 - DNA, 22 bp, Artificial sequence
  Synthetic sequence
ttgatttggctttagtccctac

SEQ ID NO: 566 - DNA, 22 bp, Artificial sequence
  Synthetic sequence
gtagggactacagccaaatcac

SEQ ID NO: 567 - DNA, 521 bp, Artificial sequence
  Synthetic sequence
atctgatcttctgaagaaaatatatttctttttattcatagctcttaactagtggtgatagcaatgtcagcagtgcctttagtttttggattttctgtaggtgaagccacagatgctacagaaaacccaaaaactacaagtaaggttgaccatactctactctagagttgtgttttaatgtatattaatgttactaatgtgtttactagtggtgatagcaatgtcagcagtgcctttgatttggctttagtccctacgtgaagccacagatggtagggactacagccaaatcacaagtaaggttgaccatactctactctaggttatttttagtatgattctgtaaaaatgaattaatactaactagtggtgatagcaatgtcagcagtgccttttctgaaaacagtcaccgtaagtgaagccacagatgttacggtgaccgttttcagaacaagtaaggttgaccatactctactctagtcagttttattgatagtcttttcagtattattgataatctt

SEQ ID NO: 568 - DNA, 521 bp, Artificial sequence
  Synthetic sequence
atctgatcttctgaagaaaatatatttctttttattcatagctcttaactagtggtgatagcaatgtcagcagtgcctatgaagtctatgaagagtcagggtgaagccacagatgcctgactcttaatagacttcacaagtaaggttgaccatactctactctagagttgtgttttaatgtatattaatgttactaatgtgtttactagtggtgatagcaatgtcagcagtgccttacaagtttactcactacctgggtgaagccacagatgccaggtagtgcgtaaacttgtcaagtaaggttgaccatactctactctaggttatttttagtatgattctgtaaaaatgaattaatactaactagtggtgatagcaatgtcagcagtgccttaatttattaagactcatccaagtgaagccacagatgttggatgagtattaataaattcaagtaaggttgaccatactctactctagtcagttttattgatagtcttttcagtattattgataatctt

SEQ ID NO: 569 - DNA, 839 bp, Artificial sequence
  Synthetic sequence
atctgatcttctgaagaaaatatatttctttttattcatagctcttaactagtggtgatagcaatgtcagcagtgccttttctgaaaacagtcaccgtaagtgaagccacagatgttacggtgaccgttttcagaacaagtaaggttgaccatactctactctagttatattctttaggcacgaatgtgtgtttaaaaaaaataaaaactagtggtgatagcaatgtcagcagtgccttacaagtttactcactacctgggtgaagccacagatgccaggtagtgcgtaaacttgtcaagtaaggttgaccatactctactctagagttgtgttttaatgtatattaatgttactaatgtgtttactagtggtgatagcaatgtcagcagtgcctttagtttttggattttctgtaggtgaagccacagatgctacagaaaacccaaaaactacaagtaaggttgaccatactctactctaggttatttttagtatgattctgtaaaaatgaattaatactaactagtggtgatagcaatgtcagcagtgccttaatttattaagactcatccaagtgaagccacagatgttggatgagtattaataaattcaagtaaggttgaccatactctactctagatttttcagatgtatcatctcttaaaatactgtaattgcaactagtggtgatagcaatgtcagcagtgcctttgatttggctttagtccctacgtgaagccacagatggtagggactacagccaaatcacaagtaaggttgaccatactctactctagtcagttttattgatagtcttttcagtattattgataatctt

SEQ ID NO: 570 - DNA, 1657 bp, Artificial sequence
  Synthetic sequence
ggcttgcccatcatatgagtgccacctgactgaaggactctagctcctggcacaggtatgacagcagacactgtggcttctcttcctgcccagatctcaggcccatggcgacttgccctgtcctgcagaaggagacgctattccagacaggagactatgcttacagaatccctgctctgatctacctgtcaaagcagaagaccctgctggcctttgcggaaaagcgtctgaccaagacggatgagcatgcagatttgtttgtcctacgaagaggaagctacaatgcagacacccatcaggtccagtggcaagctgaggaggtggtgacccaagcctacctggagggccaccgctccatgagcccatgtcctttgtatgacaagcagacaaggacccttttccttttcttcatcgctgtccgtgggcaaatatcagaacaccaccagctccagactggggttaatgtcacacggctatgccacatcaccagtactgaccatgggaagacctggagcgctgtccaggaccttacagataccaccattggcagcaccgatcaggattgggccacatttggcgtgggtcctgggcactgtctgcagctgcgaaacacagctgggagcctgctggtccctgcttatgcctatcggaaacaaccccctatccatacacctgccccctctgccttctgcttcctcagccatgaccatgggagcacatgggagctgggccactttgtgtcccagaactcgctggagtgccaggtggctgaggttggcactggcgctgagagggtggtctatctcaatgctaggagctgcctgggagccagggtccaggcacaaagtcctaacagtggcctggatttccaggacaaccaggtagtgagtaaacttgtagagcctcccaaaggctgccatggaagtgtgattgctttccccaaccccacctcaaaggcagatgccttagatgtgtggctgctctatacccaccctacagactcccggaagaggaccaacctgggtgtgtacctcaatcagaagccactggaccccaccacctggtcagctcccaccctgttggcaacaggcatctgtgcctactcggacttgcagaacatggggcacggccctgatggctccccgcaatttgggtgtctgtatgagtcaaataactatgaagagattgttttcctcatgttcaccctgaagcaagctttcccagcagtgtttggtgcccagtgatcttgctgcatgcggcccaaagtgcttcaaaacacccatctttctttcctcccagcatcctctagacttttgagtccagctcttgggccccttctttgggagtatgcggagagcttgatctcctgactcttcatagacttcattgttccagcctcggaagtgggttctatttccagcccagaaatcaaaggaacctggctttctccagcctcttgacagggaaggtggggacaatgtacacagaggctgtcattctgtgtgtcggctgtcactatgctagcttagcctgcctgtttccccactcctagtttttggatgagtcttaataaattatccaacccagcctatttcttcctggaaaaatgttcagagtctccggggaaaggtttagctaaggatatgaattagcaaag

SEQ ID NO: 571 - DNA, 1804 bp, Artificial sequence
  Synthetic sequence
gcgcgtgggcgtggcgtcacttcagcacggcgcggtctctctttcctgccagctcctgctcagagttgtcagggtctgtctccgcgtcagtggtttccgtctccgcttccctgcctccatcgccccagcccttctgcaggtcctcctccgagacctcaaggagagctcagaagccagagacactagagccgaagtcatggaagaagtatcagcctgctccctcaacagcactctgttccagcaggaacaccagaaagggaccacctaccggattccagcgctgctctacatccctcccagccacaccttcctggcctttgcagagaagcgttcctcaagcaaagacgtagatgctctccacctggtgctcaggcgaggggtgatgaagggccactctgtagagtggggacccctgcagccactgatggaagccacattgcctgggcatcggaccatgaacccctgccctgtatgggagcagagtaccagccgtgtgttactgtttttcatctgtgtgccagaccgtgttactgaacattggcagattaggtcaggcaagaatgccgcccgtctctgcttcctgtgcagtcaggatgctgggtgctcatggggtgaagtgaaggacttgactgaggaggtcattggctcagagttgaagcactgggccacatttgctgtgggcccaggccatggcatccggctgcagtcaggaaggctgatcattcccacctacgcctactatttctcatgcaggttcctctgcttcccgtgttcagtcaagccccattccctgatgatctacagtgatgacttaggagtcacatggcaccatggcaagctcattgggccccaggtgacaggggagtgccaagtggcagaagtgactgggacgtctggtaaccttgtgctctactgcaatgcccggacaccaaacagattccgagcagaatcttttagtactgattacggtgactgttttcagaaaccaaccctgaacacacaactctgtgagccccgctatggctgccaaggcagtatagtgagcttccagcccttgaagatgccattctcacaagacccaattggtaaagctgctcccactactcagaagagccctctgctggacagttttctggagcgggaggaaggagttggaagaccatcaggaacatggctcttgtactcacatccaactagcaagaagcggagaattaacctgggcatctactacaaccggaaccccttggaggtgacctgctggtcccgcccttggatcttgcactgtgggccctgtggctactctgatctggctgttgtggaagagcagggcttatttgcatgtttgtttgaatgtgggcaggagcatgagtgtgagcagattgccttccgtctattttcagtccaagaggttttgagctgtgaagactgcactggccctagtagggactaaagccaaatcaagcccgatgggtgaggacccaactttcctcagaagtgaatggcaactgcagctgggataacatgggtcactgatgtctacagaaaatccaaaaactaatacttcgctccttgtacttttcacttttccctttccaatgagccaagagaaatgtgtgccttatcttacacagcaataagggtgttgaactgggagcttggagacaatggtgtggttttggcttgctttaggactgtggatatatcccctgaactctgggcatcaggtctccatttgtaaaatgacaagggtggtttgtgatttcttgtcttcccattaaaaggagtgttcacttcttgtcccacg

SEQ ID NO: 572 - DNA, 1975 bp, Artificial sequence
  Synthetic sequence
ccgtcagattcgattcctcctcctccgaggaattctgtcccttccagctgccctgccctcccctctttaaaggttgacttgccctgcggcgctctaccgcgctccagccctttggcgcctcctgctcaaccccttgctacacgtatctgctccagcccgcccgcccgtccgcccgcccgctcgcccgctcgtccgcaccgcgccgcgcacttcccacagcaaagcagaaggacgcccagggagatggagagcaaagccctgctcctggtggctctgggagtgtggctccagagtttgaccgcctcccaaggaggggtggccgcagcagacgggggaagagattttacagacattgaaagtaaatttgccctaaggacccctgatgacacggctgaggacaattgccacctcattcccggaatagcagaatctgtgtctaactgccacttcaaccacagcagcaagaccttcgttgtgatccatggctggacggtgacaggaatgtatgagagttgggtgcccaaacttgtggctgccctgtacaagagagaacctgactccaacgtcattgtggtggactggctgtatcgggcccagcaacactatccagtgtcggctggctacaccaagctggtgggaaatgatgtggccaggttcatcaactggatggaggaagagtttaactaccccctggacaatgtccacctcttggggtatagccttggagctcatgctgctggtgtggcaggaagtctgaccaacaagaaggttaacagaatcactggcttggatccagctgggcctaactttgagtatgcagaggcccccagtcgcctttctcctgatgatgcagatttcgtagacgtcttacatacattcaccagagggtcacctggccgaagtattgggatccagaaaccagtaggacatgttgacatttatcccaatggaggcactttccagccaggatgcaacattggggaagccattcgtgtgattgcagagcggggccttggagatgtggaccagctggtaaagtgctcccatgagcgatccattcatctcttcattgactccttgctgaatgaggaaaaccccagcaaggcttacaggtgcaactccaaggaagcctttgagaaagggctctgcctgagctgcagaaagaatcgatgcaacaatgtgggctatgagatcaacaaggtcagagccaaaaggagcagcaagatgtacctgaagactcgctctcagatgccctacaaagtcttccactaccaagtcaaaattcacttttctgggactgagagtgacaagcagctcaaccaggcctttgagatttctctgtatggcacagtggccgagagtgagaatatccccttcactctgcctgaggtctccacaaataaaacctactccttcctgatttatacggaggtggacatcggagaactgctgatgatgaagctcaagtggaagagtgattcctacttcagctggtcggactggtggagcagccccggctttgtcatcgagaagattcgggtgaaagcaggagagactcagaaaaaggtcatcttctgtgctagggagaaagtgtctcatctgcagaagggaaaggactccgcagtgtttgtgaagtgccatgacaagtctctgaagaagtctggctgatactgaacaaaccaacaagagaagaaagcacaagagttctttgaagactgaagtaaacgaagtaaattttataaaaaagaaaaaaacaatacccttgtttgggtgtttgaaagtgggttttcctgagtattaatcccagctctatcttgttagttaagttagaagacaggctcaaatactaaaacgtggctaatacaaggtgaggagtctcatggccaatggcatgtcttcccgcatcaaaggacagcagataggagaagcatggtgccttttgtcccataagaaggaatcatttgttcccaataaa

SEQ ID NO: 573 - DNA, 22 bp, Artificial sequence
  Synthetic sequence
ttaactaacaagatagagctgg

SEQ ID NO: 574 - DNA, 22 bp, Artificial sequence
  Synthetic sequence
ttttataaaatttacttcgttt

SEQ ID NO: 575 - DNA, 22 bp, Artificial sequence
  Synthetic sequence
ttaaactcttcctccatccagt

SEQ ID NO: 576 - DNA, 22 bp, Artificial sequence
  Synthetic sequence
tttagtatttgagcctgtcttc

SEQ ID NO: 577 - DNA, 22 bp, Artificial sequence
  Synthetic sequence
taaatcaggaaggagtaggttt

SEQ ID NO: 578 - DNA, 22 bp, Artificial sequence
  Synthetic sequence
tacattcctgtcaccgtccagc

SEQ ID NO: 579 - DNA, 22 bp, Artificial sequence
  Synthetic sequence
ccagctctatattgttagttac

SEQ ID NO: 580 - DNA, 22 bp, Artificial sequence
  Synthetic sequence
aaacgaagtacattttataaac

SEQ ID NO: 581 - DNA, 22 bp, Artificial sequence
  Synthetic sequence
actggatggaagaagagtttac

SEQ ID NO: 582 - DNA, 22 bp, Artificial sequence
  Synthetic sequence
gaagacaggcccaaatactaac

SEQ ID NO: 583 - DNA, 22 bp, Artificial sequence
  Synthetic sequence
aaacctactcattcctgatttc

SEQ ID NO: 584 - DNA, 22 bp, Artificial sequence
  Synthetic sequence
gctggacggtaacaggaatgtc

SEQ ID NO: 585 - DNA, 521 bp, Artificial sequence
  Synthetic sequence
atctgatcttctgaagaaaatatatttctttttattcatagctcttaactagtggtgatagcaatgtcagcagtgcctttaactaacaagatagagctgggtgaagccacagatgccagctctatattgttagttacaagtaaggttgaccatactctactctagagttgtgttttaatgtatattaatgttactaatgtgtttactagtggtgatagcaatgtcagcagtgcctttttataaaatttacttcgtttgtgaagccacagatgaaacgaagtacattttataaacaagtaaggttgaccatactctactctaggttatttttagtatgattctgtaaaaatgaattaatactaactagtggtgatagcaatgtcagcagtgcctttaaactcttcctccatccagtgtgaagccacagatgactggatggaagaagagtttacaagtaaggttgaccatactctactctagtcagttttattgatagtcttttcagtattattgataatctt

SEQ ID NO: 586 - DNA, 363 bp, Artificial sequence
  Synthetic sequence
atctgatcttctgaagaaaatatatttctttttattcatagctcttaactagtggtgatagcaatgtcagcagtgcctttaactaacaagatagagctgggtgaagccacagatgccagctctatattgttagttacaagtaaggttgaccatactctactctagagttgtgttttaatgtatattaatgttactaatgtgtttactagtggtgatagcaatgtcagcagtgcctttaaactcttcctccatccagtgtgaagccacagatgactggatggaagaagagtttacaagtaaggttgaccatactctactctagtcagttttattgatagtcttttcagtattattgataatctt

SEQ ID NO: 587 - DNA, 521 bp, Artificial sequence
  Synthetic sequence
atctgatcttctgaagaaaatatatttctttttattcatagctcttaactagtggtgatagcaatgtcagcagtgccttaaatcaggaaggagtaggtttgtgaagccacagatgaaacctactcattcctgatttcaagtaaggttgaccatactctactctagagttgtgttttaatgtatattaatgttactaatgtgtttactagtggtgatagcaatgtcagcagtgccttacattcctgtcaccgtccagcgtgaagccacagatggctggacggtaacaggaatgtcaagtaaggttgaccatactctactctaggttatttttagtatgattctgtaaaaatgaattaatactaactagtggtgatagcaatgtcagcagtgcctttaactaacaagatagagctgggtgaagccacagatgccagctctatattgttagttacaagtaaggttgaccatactctactctagtcagttttattgatagtcttttcagtattattgataatctt

SEQ ID NO: 588 - DNA, 521 bp, Artificial sequence
  Synthetic sequence
atctgatcttctgaagaaaatatatttctttttattcatagctcttaactagtggtgatagcaatgtcagcagtgccttttagtatttgagcctgtcttcgtgaagccacagatggaagacaggcccaaatactaacaagtaaggttgaccatactctactctagagttgtgttttaatgtatattaatgttactaatgtgtttactagtggtgatagcaatgtcagcagtgcctttaaactcttcctccatccagtgtgaagccacagatgactggatggaagaagagtttacaagtaaggttgaccatactctactctaggttatttttagtatgattctgtaaaaatgaattaatactaactagtggtgatagcaatgtcagcagtgcctttttataaaatttacttcgtttgtgaagccacagatgaaacgaagtacattttataaacaagtaaggttgaccatactctactctagtcagttttattgatagtcttttcagtattattgataatctt

SEQ ID NO: 589 - DNA, 681 bp, Artificial sequence
  Synthetic sequence
atctgatcttctgaagaaaatatatttctttttattcatagctcttaactagtggtgatagcaatgtcagcagtgcctttttataaaatttacttcgtttgtgaagccacagatgaaacgaagtacattttataaacaagtaaggttgaccatactctactctagttatattctttaggcacgaatgtgtgtttaaaaaaaataaaaactagtggtgatagcaatgtcagcagtgcctttaaactcttcctccatccagtgtgaagccacagatgactggatggaagaagagtttacaagtaaggttgaccatactctactctagagttgtgttttaatgtatattaatgttactaatgtgtttactagtggtgatagcaatgtcagcagtgccttttagtatttgagcctgtcttcgtgaagccacagatggaagacaggcccaaatactaacaagtaaggttgaccatactctactctaggttatttttagtatgattctgtaaaaatgaattaatactaactagtggtgatagcaatgtcagcagtgccttacattcctgtcaccgtccagcgtgaagccacagatggctggacggtaacaggaatgtcaagtaaggttgaccatactctactctagtcagttttattgatagtcttttcagtattattgataatctt

SEQ ID NO: 590 - DNA, 2213 bp, Artificial sequence
  Synthetic sequence
tcacgtggcccgactgaggcacgcgatggcggcccccatggaccggagccccggcggccgggcggtccgggcgctgaggctagcgctggcgctggcctcgctgactgaggtgttgctgaattgcccggcgggcgccctccccacgcaggggcccggcaggcggcgccaaaacctcgacccgccggtctcccgcgtccgctcggtgctgctggacgccgcgtcgggtcagctgcgcctggtggacggcatccatccctacgcggtggcctgggccaacctcaccaacgccattcgcgagaccgggtgggcctatctggacttgggtacaaatggaagctacaatgacagcctgcaggcctatgcagctggtgtggtggaggcttctgtgtctgaggagctcatctacatgcactggatgaacacaatggtcaactactgtggccccttcgagtatgaagttggctactgtgagaagctcaagagcttcctggagatcaacctggagtggatgcagagggagatggaactcagccaggactctccatattggcaccaggtgcggctgaccctcctgcagctgaaaggcctagaggacagctacgaaggccgtttgaccttcccaactgggaggttcaccattaaacccttggggttcctcctgctgcagattgccggagacctggaagacctagagcaagccctgaataagaccagcaccaagctttccctgggctccggttcctgctccgctatcatcaagttgctgccaggcgcacgtgacctcctggtggcacacaacacatggaactcctaccagaacatgctacgcatcatcaagaagtaccagctgcagttccggcaggggcctcaagaggcgtaccccctgattgctggcaacaatttggtcttttcgtcttacccgggcaccatcttctctggcgatgacttctacatcctgggcagtgggctggtcaccctggagaccaccattggcaacaagaatccagccctgtggaagtacgtgcagccccagggctgtgtgctggagtggattcgaaacatcgtggccaaccgcctggccttggacggggccacctgggcagacatcttcaagcagttcaatagtggcacgtataataaccaatggatgattgtggactacaaggcattcatccccaacgggcccagccctggaagccgagtgcttaccatcctagaacagatcccgggcatggtggtggtggccgacaagactgaagatctctacaagacaacctactgggctagctacaacatcccgttctttgagattgtgttcaacgccagtgggctgcaggacttggtggcccaatatggagattggttttcctacactaagaaccctcgagctcagatcttccagagggaccagtcgctggtggaggacatgaattccatggtccggctcataaggtacaacaacttccttcacgaccctctgtcactgtgtgaagcctgtatcccgaagcccaatgcagagaatgccatctctgcccgctctgacctcaatcctgccaatggctcctacccatttcaagccctgtaccagcgtccccacggtggcatcgatgtgaaggtgaccagcttttcactggccaagcgcatgagcatgctggcagccagtggcccaacgtgggatcagttgcccccattccagtggagtttatcgccgttccgcagcatgcttcacatgggccagcctgatctctggacattctcacccatcagtgtcccatgggactgagactttgcctccacccagttgccttcattctgtgtggccagtagggtcacacacctgctacccaccctttggggctctgtcctcactggactctggtctgtgtggtctcctctgcagggacacaaacccagtaggctcagagctgactccatccccaagtcttctgccctccatcactccttctctctgcccctgtcaccagtgggctggggcttgtgcttggctgtgggcctggtgggattctgggcgccattttcctagtgctggtccctcagtgtgtgtgtgggggacattgatagggcttatcattgctgtcactactagcctgcgggcccatctcctcagggagcagtccatgtccccttctctgggcagctttcctgaggatagaagcttgaaaacaaaaaaccaaagtttctggctgctttta

SEQ ID NO: 591 - DNA, 3000 bp, Artificial sequence
  Synthetic sequence
ttgtttcttatctgtcttcctgtaggattttatgctacacctggttcaagactttgaaacagggcattgaactgtcaatgcatgttcgtgtggtaacattcagctggctactttaaatagaggaagatgcagatcctcggcctggtggtctgtcttttcctttcggtcctgctttctgggaggcccacggggtccattccacatgtggaccccgaagcaaacatgaacgtgaccgaaatgatcaggtactggggatacccgagtgaggagcatatgatccagacagaggacgggtatattctgggtgttcaccgaatccctcatggccggaagaaccattctcacaaaggtcccaaaccagttgtctatcttcagcatggcttcctggcagattctagtaactgggtcacaaactctgacaacagcagcctgggcttcattctggccgatgctggttttgatgtgtggctggggaacagcagaggaaacacctggtctctgaaacataggactctctccatttctcaggatgaattctgggccttcagttttgatgagatggcaaaatatgacctacctgcttcaatttattacattgtgaataaaactggtcaagaacaagtgtattatgtgggtcattctcaaggcaccaccataggttttatagcattttcacagatacctgagctggcaaagaagattaaaatgttttttgccttggcccctgtggtgtttctcaatttcgccttgagccctgtgatcaagatttcaaagtggccagaagttattattgaggacttgtttggacacaaacagtttttcccccagagtgctaaactgaaatggctgagcactcacgtttgcaatcgcgttgtcctgaagaagctttgcacaaatgtcttctttcttatatgtggtttcaatgagaagaatttaaatgagtctagagtgaatgtgtatacatcacactctcctgcgggaacctcggtgcaaaacttacgacactggggccagattgctaaacaccatatgtttcaagcttttgactggggaagcaaggccaagaattattttcattacaaccagacttgccctcccgtgtatgacttaaaagacatgcttgtacccactgctttgtggagtggggaccatgactggctggcagaccccagtgacgtcaacatcttgctgactcagatccccaacttggtgtaccacaagcgcctccctgactgggaacatctggattttctctggggtttggatgccccctggaggatgtataacgaaatagtcaatctattgaggaaataccagtgaaaacctgacttgagatatataccctttagtagggcaaaaagatgtttgcttcatttctgtaaaatgcttgtgttttccttgcctagatcttttgttttacatgcaagaagatgatggctttgaaggtatctgtgctctctagttagttagaagcactctagttgtcttatgcttaattatgactaacaagctagcatcacagccagtgatgccttttgaagtctttaaaaggtgtgggtgttatgtgaaaatgtcatcgtaatcattatgttactttttactattgtttttggtgtaagcatgccacttatacatgcgtatgcgtgtgctatgtactggtcagacctgccttgtgtggaggtcagggctagtatcaggatgtcttcttcagacactcatcatcttattttttgaggcagggtctctcactgaacgtggagcttgcatatttcagctagactggctgaccaatgaacctccaggatctgcctgtctctaccttctctctcatcagtgctgggcttataggtacatgatgccccatccagtgtttttactttggttctaggggcataaactcaggttctcatgcttgtggatcaggcactttgcccacaaaaccatctccccaacccatctgtaatttaaaagctatgcaattacctttctattcccaccaaacacaagtgagaacgtataggacacttcaagctatcatttttgttagcaaaaacaaatctgtctcttctttgaacgcagtatgaaaaataccttgttctgggcttgacatgggtcctggggagaccaaggcaggaagactgctgctagatttagggcttatctagagagtgaaactttatctcccccccaaaaaaaccaaccaaccaaacaaacaaacaaacaaaaaaccaaagacaaaggaacaacaaaaccaaagtgctcagttctcttttctttgccttagatgctctccagcccagtgttcctgtgtttacctgcctcaacaacatttttcatgtttttatgcactaactacctagtcaaatccagtgttaccccagccttgtcaggaatattctttcttcaagttttaccaaacctcaataacaagtgtttagcaaatattcagattttttaggctaagtcaaagaaaaaaaaaaaagccaagaatcgtgtaaagcagattgtactgaataataataataaaaaatctcttgtaaacaccttgaaggttgatctactcagctgtgtgtgttcatcaggtcacttttctgtgaagaaactccctgtggagggacaaaccactcatttttcagaagggaatgcggttgctgtgatggtgtgtgtgtgaagccaaagttggctgcctgtgacaagtgtcctggttaatttttcacacaaatgaactggatattctcagatcaacgctcagctcaggaattcgattctgaaaaccagtgttgtatgctctatactgtgtgcagaaaacctgcatttgtctgctcgctattgtcagctgaatggctagttgataagttttctgacctagttaccttagatgcagcaatattacttgatattggctcatacatgcagacagaatgatacaactttgtaacattttaaaggttcgtatttgaacttttcaataaagctcagcctcacaggcctgaacaatta

SEQ ID NO: 592 - DNA, 2343 bp, Artificial sequence
  Synthetic sequence
gtgccccccgccgccgctgcagagtcgcctggagcttcgcgggcaactgggaagatgctgggcccaagtgtcctcacctgggtcctcttggccgcgggtgtcacctgcgcccaggcacagcaagtgccaccgtggacagaagattgcagaaaatcaacttatcctccttctggaccaacctatagaggagcagttccatggtacaccataaaccttgatttaccaccctacaaaagatggcatgaagtagtaactcagaaggcaccaatggtgaggattatagtgaattccctcaagaatttagtaaacgcatttgtgccaagtggaaaaataatgcaggtggtggaccaaaagttgcctggtctaattggcaagattcctggcccctttgaagaggaaatgaagggaattgcagatgttactgggatacctttaggagagattatttcattcaacattttctatgaattgtttaccatgtgtacatcaataataaccgaagataatgaaggtcatttactacatggaagaaacatggattttggaatatttcttgggtggaatataaataacaacacttgggttgttacagaagaattaaagtctttaacagtgaatttggacttccaaagaaacaacaagactgttttcaaggctacaagcttcgttggatatgtgggcatgttgacagggttcaaaccaggactgtttagtcttacactaaatgaacgtttcagtctaaatggcggttatttgggtatcctagaatggattttgggaaagaaagatgctgaatgggtcgggtttatcactagatcagttctggaaaatagtacaagttatgacgaagccaagaatacactaatcaagaccaagctaatggccccagcatattttatcctgggaggcaacaagtctggggaaggctgtgtgattacgagagaaagaagagagtctttggatgtatttgaactcgatcctaagcatgacagatggtatgtggtacaaaccaattatgaccggtggaaaaacaccttgttccttgatgaccgcagaacacctgccaagatgtgtctaaatcgcacgacacagaagaatctctcgtttgcaaccatatatgacgtcctatcaacaaagcctgtcctcaacaagctgactgtattcacaaccttgattgatgtcaccaaaggtcaatttgaaagttaccttcgggattgcccagacccttgcataggctggtgagcacacatggcctataggacatactgaagatgtgttctctggcgtgtctgatctccttccacaggctaagactcaaggcctgttgttcagtcataagattatcctcagtgtgtctgcagtttacaaactgtttttgttgtttgtttttatcatcatcatcattcctatttacaggtaaattctttaagggatgcacgccatatagaattcgccagttcatttcactttgacattggggaaggggcaaccctgacctctatggaatgtatcaaggttcttagctggtgttaaatccagtgccctgtgtgattaatgtatacctttatgcgccttttcttttttacctacatatttatgtttctcctggttctctattagaatcagcatgtcatccacctttgctgttggtaacagcaatgtgatgtcactatgcctggctggggtttctgagatggacaactgacacttagtgcataataaatagacctttgactctggaattagtatttgtgagggctacaaaataatcgttatgtaaacagtattttttttctttctgagacagggtttctctgtggctttggaggctgtcctggaactagctcttgtagaccaggctggtctcaaactcacagagatccgcctgcctctgcctcccaagtgctgggttaaaggcatgtgctaccaacatctggcaacagtatttttttttgaaagaataaaagtgttctctttttcctaattatattaccttccagtaaccccaggaagtttctagctttaaaaacttgagtttaagatctcaacacaaactaaattcctgtatgtataattcatttaatacttttttcatttttccttctaatcaacatattttttaacttttcatataataaatacttattaatattttttagaaatcaatctatttatgaaaaaatgcttacagaacttgttcatctttctctaactttcataactgacagtgaaatgtatgctatttgtgccagactgtatccatttcatgttgtacaatctcagttgtatcatgatgctcaataaacagtcactggcagtcatgtcagcactcatgcatgctga

SEQ ID NO: 593 - DNA, 2157 bp, Artificial sequence
  Synthetic sequence
cggggttggggttgcgccttttccaaggcagccctgggtttgcgcagggacgcggctgctctgggcgtggttccgggaaacgcagcggcgccgaccctgggcctcgcacattcttcacgtccgttcgcagcgtcacccggatcttcgccgctacccttgtgggccccccggcgacgcttcctcgtccgcccctaagtcgggaaggttccttgcggttcgcggcgtgccggacgtgacaaacggaagccgcacgactcactagtaccctcgcagacggacagcgccagggagcaatggcagcgcgccgaccgcgatgggctgtggccaatagcggctgctcagcagggcgcgccgagagcagcggccgggaaggggcggtgcgggaggcggggtgtggggcggtagtgtgggccctgttcctgcccgcgcggtgttccgcattctgcaagcctccggagcgcacgtccgtctcaggggagagacgtgtgttcactagcaacctcaaacattttttgtgtcaaaaggggaggaattgatcaaagagaaccctcatcctaaactgtaccctgagggaactgtcaacaatcaccacttcaaatgcacctcagagggcgagggaaagccctacgaagggacccagacccctcgcattaaggtggtcgaaggcggaccactcccttttgcattcgacatcctggctacctccttcccttacggatcgcgcacttttatcaagtacccgaaggggatcccggacttcttcaagcaatccttccctgagggattcacttgggaacgggtcacgacctacgaagatggaggcgtggtgaccgtgcctcaagacactagcctggaagatggctgccttgtctacaacgtgaagatcagaggtgtgaacttcccatccaatggccccgtgcctcagaaaaagactctggggtgggaagccaataccgaacctctctacccagcggacggaggactcgaaggccggtctgaccctgccctgaagctggtcggaggaggacatttgtcgtgtagctttgtgactacgtaccggtcgaagaagccggccaaaaacctgaagatgccgggtatccacgcggtggaccatagactggaacgcctggaggagagcgataacgagatgttcgtcgttcagagggaacacgctgtggcacgatattgcgatctcccgtcgaagcttggtcacaagctcaattaatgaaaaatctgatcttctgaagaaaatatatttctttttattcatagctcttaactagtggtgatagcaatgtcagcagtgcctatgaagtctatgaagagtcagggtgaagccacagatgcctgactcttaatagacttcacaagtaaggttgaccatactctactctagagttgtgttttaatgtatattaatgttactaatgtgtttactagtggtgatagcaatgtcagcagtgccttacaagtttactcactacctgggtgaagccacagatgccaggtagtgcgtaaacttgtcaagtaaggttgaccatactctactctaggttatttttagtatgattctgtaaaaatgaattaatactaactagtggtgatagcaatgtcagcagtgccttaatttattaagactcatccaagtgaagccacagatgttggatgagtattaataaattcaagtaaggttgaccatactctactctagtcagttttattgatagtcttttcagtattattgataatcttggggaaaagcttaattaatggctaataaaggaaatttattttcattgcaatagtgtgttggaattttttgtgtctctcactcggaagaacatatgggagggcaaatcatttaaaacatcagaatgagtatttggtttagagtttggcaacatatgcccatatgctggctgccatgaacaaaggttggctataaagaggtcatcagtatatgaaacagccccctgctgtccattccttattccatagaaaagccttgacttgaggttagattttttttatattttgttttgtgttatttttttctttaacatccctaaaattttccttacatgttttactagccagatttttcctcctctcctgactactcccagtcatagctgtccctcttctcttatggagatc

SEQ ID NO: 594 - DNA, 9023 bp, Artificial sequence
  Synthetic sequence
aaaaatctgatcttctgaagaaaatatatttctttttattcatagctcttaactagtggtgatagcaatgtcagcagtgcctatgaagtctatgaagagtcagggtgaagccacagatgcctgactcttaatagacttcacaagtaaggttgaccatactctactctagagttgtgttttaatgtatattaatgttactaatgtgtttactagtggtgatagcaatgtcagcagtgccttacaagtttactcactacctgggtgaagccacagatgccaggtagtgcgtaaacttgtcaagtaaggttgaccatactctactctaggttatttttagtatgattctgtaaaaatgaattaatactaactagtggtgatagcaatgtcagcagtgccttaatttattaagactcatccaagtgaagccacagatgttggatgagtattaataaattcaagtaaggttgaccatactctactctagtcagttttattgatagtcttttcagtattattgataatcttggggaaaagcttaattaatggctaataaaggaaatttattttcattgcaatagtgtgttggaattttttgtgtctctcactcggaagaacatatgggagggcaaatcatttaaaacatcagaatgagtatttggtttagagtttggcaacatatgcccatatgctggctgccatgaacaaaggttggctataaagaggtcatcagtatatgaaacagccccctgctgtccattccttattccatagaaaagccttgacttgaggttagattttttttatattttgttttgtgttatttttttctttaacatccctaaaattttccttacatgttttactagccagatttttcctcctctcctgactactcccagtcatagctgtccctcttctcttatggagatcagaaaattttgtgtcgcccttcgctgaacaccaggtgggccgcctactgcgcacgcgcgggtttgcgggcagccgcctgggctgtgggagcagcccgggcagagctctcctgcctctccaccagcccaccccgccgcctgaccgccccctccccaccccccaccccccacccccggaaaacgcgtcgtcccctgggctgggtggtgacccccgtcccgcgaaacaccgggccccgcgcagcgtccgggcctgacaccgctccggcggctcgcctcctatgcgcccccgcgccaccgtcgcccgcccgcccgggcccctgcagccgcccaggtgccagcacggagcgcctggcggcggaacgcagaccccaggcccggcgcacaccggggacgctgagcgttccaggcgggagggaaggcgggcagagatggagagaggaacgggagtcctagaggggcggaaggacgggcggagggacgttaggagggagggagggaggcagggaggcagggaggaacggagggaaagacagagcgacgcagggactgggggcgggcgggagggagccggggaacggggggaggaaggcagggaggaaaagcggtcctcggcctccgggagtagcgggacccccgccctccgggaaaacggtcagcgtccggcgcgggctgagggctgggcccacagccgccgcgccggccggcggggcaccacccattcgccccggttccgtggcccagggagtgggcggtttcctccgggacaaaagaccgggactcgggttgccgtcgggtgttcacccgcgcggttcacagaccgcacatccccaggctgagccctgcaacgcggcgcgaggccgacagccccggccacggaggagccacacgcaggacgacggaggcgtgattttggtttccgcgtggctttgccctccgcaaggcggcctgttgctcaagtctctccggcccccgaaaggctggccatgccgactgtttgctcccggagctctgcgggcacccggaaacatgcagggaagggtgcaagcccggcacggtgccttcgctctccttgccaggttccaaaccggccacactgcagactccccacgttgccgcacgcgggaatccatcgtcaggccatcacgccggggaggcatctcctctctggggtgtcgctctggacttctacgtggaaatgaacgagagccacacgcctgcgtgtgccagaccgtcccggcaacggcgacgcccacaggcattgcctccttcacggagagagggcctggcacactcaagactcccacggaggttcagttccacactccacctaggtcatatttttagtttaaaaaaataattatatgttttataatgaaaagaatctcattatctttcagtattaggttgatttatattccaaagaataatatttttgttaaattgttgatttttgtaaacctctaaatgtttgttgctaaaattactgtgtttaagaaaaagattaataaataataataatttcataattaaaaacttctttcattgaatgccattaaataaaccattattttacaaaataagatcaacataattgagtaaataataataagaacaatattatagtacaacaaaatatgggtatgtcataccctgccacattcttgatgtaactttttttcacctcatgctcgccgggttaagggctacaatgaactcgaaacgaccggtttgcatttttagacatttagaagcctatatcttgttacagaattggaattacacaaaaattctaccatattttgaaagcttaggttgttctgaaaaaaacaatatattgttttcctgggtaaactaaaagtcccctcgaggaaaggcccctaaagtgaaacagtgcaaaacgttcaaaaactgtctggcaatacaagttccactttgaccaaaacggctggcagtaaaagggttaagcggccgctcagccttgagcggtatcagctcactcaaaggcggtaatacggttatccacagaatcaggggataacgcaggaaagaacatgtgagcaaaaggccagcaaaaggccaggaaccgtaaaaaggccgcgttgctggcgtttttccataggctccgcccccctgacgagcatcacaaaaatcgacgctcaagtcagaggtggcgaaacccgacaggactataaagataccaggcgtttccccctggaagctccctcgtgcgctctcctgttccgaccctgccgcttaccggatacctgtccgcctttctcccttcgggaagcgtggcgctttctcatagctcacgctgtaggtatctcagttcggtgtaggtcgttcgctccaagctgggctgtgtgcacgaaccccccgttcagcccgaccgctgcgccttatccggtaactatcgtcttgagtccaacccggtaagacacgacttatcgccactggcagcagccactggtaacaggattagcagagcgaggtatgtaggcggtgctacagagttcttgaagtggtgggctaactacggctacactagaagaacagtatttggtatctgcgctctgctgaagccagttaccttcggaaaaagagttggtagctcttgatccggcaaacaaaccaccgctggtagcggtggtttttttgtttgcaagcagcagattacgcgcagaaaaaaaggatctcaagaagatcctttgatcttttctacggggtctgacgctcagtggaacgacgcgcgcgtaactcacgttaagggattttggtcatgagttagaaaaactcatcgagcatcaaatgaaactgcaatttattcatatcaggattatcaataccatatttttgaaaaagccgtttctgtaatgaaggagaaaactcaccgaggcagttccataggatggcaagatcctggtatcggtctgcgattccgactcgtccaacatcaatacaacctattaatttcccctcgtcaaaaataaggttatcaagtgagaaatcaccatgagtgacgactgaatccggtgagaatggcaaaagtttatgcatttctttccagacttgttcaacaggccagccattacgctcgtcatcaaaatcactcgcatcaaccaaaccgttattcattcgtgattgcgcctgagcgaggcgaaatacgcgatcgctgttaaaaggacaattacaaacaggaatcgagtgcaaccggcgcaggaacactgccagcgcatcaacaatattttcacctgaatcaggatattcttctaatacctggaacgctgtttttccggggatcgcagtggtgagtaaccatgcatcatcaggagtacggataaaatgcttgatggtcggaagtggcataaattccgtcagccagtttagtctgaccatctcatctgtaacatcattggcaacgctacctttgccatgtttcagaaacaactctggcgcatcgggcttcccatacaagcgatagattgtcgcacctgattgcccgacattatcgcgagcccatttatacccatataaatcagcatccatgttggaatttaatcgcggcctcgacgtttcccgttggatatggctcattttttacttcctcaccttgtcgtattatactatgccgatatactatgccgatgattaattgtcgacactgcgggggctctggcgcgccttaacccggcgagcatgaggcagggtatctcataccctggtaaaattttaaagttgtgtattttataaaattttcgtctgacaacactagcgcgctcagtagctggaggcaggagcgtgcgggaggggatagtggcgtgatcgcagtgtggcacgggacaccggcgagatattcgtgtgcaaacctgtttcgggtatgttataccctgcctcattgttgacgtattttttttatgtaatttttccgattattaatttcaactgttttattggtatttttatgttatccattgttctttttttatgatttactgtatcggttgtctttcgttcctttagttgagtttttttttattattttcagtttttgatcaaaccatgacgcggctagacatgcacgaccattaacctttttactgccaatgacgcatgggatacgtcgtggcagtaaaagggcttaaatgccaacgacgcgtcccatacgttgttggcattttaattcttctctctgcagcggcagcatgtgccgccgctgcagagagtttctagcgatgacagcccctctgggcaacgagccgggggggctgtcgctagcgcgagctcacggggacagcccccccccaaagcccccagggatgtaattacgtccctcccccgctagggggcagcagcgagccgcccggggctccgctccggtccggcgctccccccgcatccccgagccggcagcgtgcggggacagcccgggcacggggaaggtggcacgggatcgctttcctctgaacgcttctcgctgctctttgagcctgcagacacctggggggatacggggaaaaagctttaggctgaaagagagatttagaatgacagaatcatagaacggcctgggttgcaaaggagcacagtgctcatccagatccaaccccctgctatgtgcagggtcatcaaccagcagcccaggctgcccagagccacatccagcctggccttgaatgcctgcagggatggggcatccacagcctccttgggcaacctgttcagtgcgtcaccaccctctgggggaaaaactgcctcctcatatccaacccaaacctcccctgtctcagtgtaaagccattcccccttgtcctatcaagggggagtttgctgtgacattgttggtctggggtgacacatgtttgccaattcagtgcatcacggagaggcagatcttggggataaggaagtgcaggacagcatggacgtgggacatgctggtgttgagggctctgggacactctccaagtcacagcgttcagaacagccttaaggataagaagataggatagaaggacaaagagcaagttaaaacccagcatggagaggagcacaaaaaggccacagacactgctggtccctgtgtctgagcctgcatgtttgatggtgtctggatgcaagcagaaggggtggaagtgcttgcctggagagatacagctgggtcagtaggactgggacaggcagctggagaattgccatgtagatgttcatacaatcgtcaaatcatgaaggctggaaaagccctccaagatccccaagaccaaccccaacccacccaccgtgcccactggccatgtccctcagtgccacatccccacagttcttcatcacctccagggacggtgacccccccacctccgtgggcagctgtgccactgcagcaccgctctttggagaaggtaaatcttgctaaatccagcccgaccctcccctggcacaacgtaaggccattatctctcatccaactccaggacggagtcagtgagaatattggtaccggggtgtggtgtcttctttctttatgttttaaatgcactgacctcccacattccctttttagtaaaatattcagaaataatttaaatacatcattgcaatgaaaataaatgttttttattaggcagaatccagatgctcaaggcccttcataatatcccccagtttagtagttggacttagggaacaaaggaacctttaatagaaattggacagcaagaaagcgagttatcaggcaccgggcttgcgggtcatgcaccaggtgcgcggtccttcgggcacctcgacgtcggcggtgacggtgaagccgagccgctcgtagaaggggaggttgcggggcgcggatgtctccaggaaggcgggcaccccggcgcgctcggccgcctccactccggggagcacgacggcgctgcccagacccttgccctggtggtcgggcgacacgccgacggtggccaggaaccacgcgggctccttgggccggtgcggcgccaggaggccttccatctgttgctgcgcggccagccgggaaccgctcaactcggccatgcgcgggccgatctcggcgaacaccgcccccgcttcgacgctctccggcgtggtccagaccgccaccgcggcgccgtcgtccgcgacccacaccttgccgatgtcgagcccgacgcgcgtgaggaagagttcttgcagctcggtgacccgctcgatgtggcggtccggatcgacggtgtggcgcgtggcggggtagtcggcgaacgcggcggcgagggtgcgtacggccctggggacgtcgtcgcgggtggcgaggcgcaccgtgggcttgtactcggtcatggtggcgacgtgcgctccggaggcttgcagaatgcggaacaccgcgcgggcaggaacagggcccacactaccgccccacaccccgcctcccgcaccgccccttcccggccgctgctctcagaaagcgaaggagcaaagctgctattggccgctgccccaaaggcctacccgcttccattgctcagcggtgctgtccatctgcacgagactagtgagtcgtgctacttccatttgtcacgtcctgcacgacgcgagctgcggggcgggggggaacttcctgactaggggaggagtagaaggtggcgcgaaggggccaccaaagaacggagccggttggcgcctaccggtggatgtggaatgtgtgcgaggccagaggccacttgtgtagcgccaagtgcccagcggggctgctaaagcgcatgctccagactgccttgggaaaagcgcctcccctacccggtagagaaacttgatctgtcgccgcaattcaaacttcgtgaggctccggtgcccgtcagtggaagactactctggagacgattccggggttggggttgcgccttttccaaggcagccctgggtttgcgcagggacgcggctgctctgggcgtggttccgggaaacgcagcggcgccgaccctgggcctcgcacattcttcacgtccgttcgcagcgtcacccggatcttcgccgctacccttgtgggccccccggcgacgcttcctcgtccgcccctaagtcgggaaggttccttgcggttcgcggcgtgccggacgtgacaaacggaagccgcacgactcactagtaccctcgcagacggacagcgccagggagcaatggcagcgcgccgaccgcgatgggctgtggccaatagcggctgctcagcagggcgcgccgagagcagcggccgggaaggggcggtgcgggaggcggggtgtggggcggtagtgtgggccctgttcctgcccgcgcggtgttccgcattctgcaagcctccggagcgcacgtccgtctcaggggagagacgtgtgttcactagcaacctcaaacattttttgtgtcaaaaggggaggaattgatcaaagagaaccctcatcctaaactgtaccctgagggaactgtcaacaatcaccacttcaaatgcacctcagagggcgagggaaagccctacgaagggacccagacccctcgcattaaggtggtcgaaggcggaccactcccttttgcattcgacatcctggctacctccttcccttacggatcgcgcacttttatcaagtacccgaaggggatcccggacttcttcaagcaatccttccctgagggattcacttgggaacgggtcacgacctacgaagatggaggcgtggtgaccgtgcctcaagacactagcctggaagatggctgccttgtctacaacgtgaagatcagaggtgtgaacttcccatccaatggccccgtgcctcagaaaaagactctggggtgggaagccaataccgaacctctctacccagcggacggaggactcgaaggccggtctgaccctgccctgaagctggtcggaggaggacatttgtcgtgtagctttgtgactacgtaccggtcgaagaagccggccaaaaacctgaagatgccgggtatccacgcggtggaccatagactggaacgcctggaggagagcgataacgagatgttcgtcgttcagagggaacacgctgtggcacgatattgcgatctcccgtcgaagcttggtcacaagctcaattaatg

SEQ ID NO: 595 - DNA, 363 bp, Artificial sequence
  Synthetic sequence
atctgatcttctgaagaaaatatatttctttttattcatagctcttaactagtggtgatagcaatgtcagcagtgccttacaagtttactcactacctgggtgaagccacagatgccaggtagtgcgtaaacttgtcaagtaaggttgaccatactctactctagagttgtgttttaatgtatattaatgttactaatgtgtttactagtggtgatagcaatgtcagcagtgccttaatttattaagactcatccaagtgaagccacagatgttggatgagtattaataaattcaagtaaggttgaccatactctactctagtcagttttattgatagtcttttcagtattattgataatctt

SEQ ID NO: 596 - DNA, 363 bp, Artificial sequence; identical to SEQ ID NO: 217
  Synthetic sequence

SEQ ID NO: 597 - DNA, 9974 bp, Artificial sequence
  Synthetic sequence
aaaaatctgatcttctgaagaaaatatatttctttttattcatagctcttaactagtggtgatagcaatgtcagcagtgccttaactcatagatctaaagccaagtgaagccacagatgttggctttagctctatgagttcaagtaaggttgaccatactctactctagagttgtgttttaatgtatattaatgttactaatgtgtttactagtggtgatagcaatgtcagcagtgccttagagtacaacagttgcccagggtgaagccacagatgcctgggcaaccgttgtactctcaagtaaggttgaccatactctactctaggttatttttagtatgattctgtaaaaatgaattaatactaactagtggtgatagcaatgtcagcagtgcctttgtttagaattatacaggggcgtgaagccacagatggcccctgtatcattctaaacacaagtaaggttgaccatactctactctagtcagttttattgatagtcttttcagtattattgataatcttggggaaaagcttaattaagatccttttccctctgaccagaattatgggaacatcatgaagccccttgagcatctagcttctggctaataaaggaaatttattttcattgcaatagtgtgttggaattttttgtgtctctcactcggaaggacatatgggagggcaaatcatttaaaacatcagaatgagtatttggtttagagtttggcaacatatgcccatatgctggctgccatgaacaaaggttggctataaagaggtcatcagtatatgaaacagccccctgctgtccattccttattccatagaaaagccttgacttgaggttagattttttttatattttgttttgtgttatttttttctttaacatccctaaaattttccttacatgttttactagccagatttttcctcctctcctgactactcccagtcatagctgtccctcttctcttatggagatcagaaaattttgtgtcgcccttcgctgaacaccaggtgggccgcctactgcgcacgcgcgggtttgcgggcagccgcctgggctgtgggagcagcccgggcagagctctcctgcctctccaccagcccaccccgccgcctgaccgccccctccccaccccccaccccccacccccggaaaacgcgtcgtcccctgggctgggtggtgacccccgtcccgcgaaacaccgggccccgcgcagcgtccgggcctgacaccgctccggcggctcgcctcctatgcgcccccgcgccaccgtcgcccgcccgcccgggcccctgcagccgcccaggtgccagcacggagcgcctggcggcggaacgcagaccccaggcccggcgcacaccggggacgctgagcgttccaggcgggagggaaggcgggcagagatggagagaggaacgggagtcctagaggggcggaaggacgggcggagggacgttaggagggagggagggaggcagggaggcagggaggaacggagggaaagacagagcgacgcagggactgggggcgggcgggagggagccggggaacggggggaggaaggcagggaggaaaagcggtcctcggcctccgggagtagcgggacccccgccctccgggaaaacggtcagcgtccggcgcgggctgagggctgggcccacagccgccgcgccggccggcggggcaccacccattcgccccggttccgtggcccagggagtgggcggtttcctccgggacaaaagaccgggactcgggttgccgtcgggtgttcacccgcgcggttcacagaccgcacatccccaggctgagccctgcaacgcggcgcgaggccgacagccccggccacggaggagccacacgcaggacgacggaggcgtgattttggtttccgcgtggctttgccctccgcaaggcggcctgttgctcaagtctctccggcccccgaaaggctggccatgccgactgtttgctcccggagctctgcgggcacccggaaacatgcagggaagggtgcaagcccggcacggtgccttcgctctccttgccaggttccaaaccggccacactgcagactccccacgttgccgcacgcgggaatccatcgtcaggccatcacgccggggaggcatctcctctctggggtgtcgctctggacttctacgtggaaatgaacgagagccacacgcctgcgtgtgccagaccgtcccggcaacggcgacgcccacaggcattgcctccttcacggagagagggcctggcacactcaagactcccacggaggttcagttccacactccacctaggagatactgaatattgaaaatctcagaaaatgtgacaagttaaattacaaaaaaaaagtgtttgtgaaggaaaaaaatattaaatatagtgttggaataaaaaaatagtattgtttgtctctttcctaaatgttgaaatattctaaaataaagttgatatcagtttaacctgtttttttattgttttgagtggatttacacagtatgggtcaaaatgacccgcaacataatcaaggtaattttttttcaacataatacgagggttaatccgcctaaggtgctggttcttttggtgcttgtattttttttcttcccataatacaaagataattatgaatgtgcctaatgctaaaaagactgttaaaaattaatattttatgtaagtttgttgattatttctaatattttaatgaatactttgtgatttttgatctcatgtgattttgccaaaaattttgctaagtgttttttaaaaacactcaaaagttaattataaataaaaaaattaaacaaaaaacattttattttatttaaaatctatccacaaaagcttattattatacaataaaacctaaaaaccccaaatattttaaaatatgaacatttatatacacgggccgcggaggcccccacgtcagtacttacgtgaaaataattccacctcagtagctaaaggttaagcgagaagattgcgagctgtatcttttcgattatccaaagataatagtattttagttgatttattagtgccttaaattaatgaaagtctgacttcgatctctgcattatatgtaagattgttaattatagaactaagagtttaatttctgttaattaaaattaagcgattttgaataattgttaaataaagatattttcacatacatttacatattttatttattatctgtaataataatacattctaaaagacataaatataaaacaaaattttcctagcttgttcatttgtgtaaaacatgtattttcaatatcgggtttgacagacccaccaggcatgccgtgtgatttttatgtaccaggcatgtcaagggttaagcggccgctcagccttgagcggtatcagctcactcaaaggcggtaatacggttatccacagaatcaggggataacgcaggaaagaacatgtgagcaaaaggccagcaaaaggccaggaaccgtaaaaaggccgcgttgctggcgtttttccataggctccgcccccctgacgagcatcacaaaaatcgacgctcaagtcagaggtggcgaaacccgacaggactataaagataccaggcgtttccccctggaagctccctcgtgcgctctcctgttccgaccctgccgcttaccggatacctgtccgcctttctcccttcgggaagcgtggcgctttctcatagctcacgctgtaggtatctcagttcggtgtaggtcgttcgctccaagctgggctgtgtgcacgaaccccccgttcagcccgaccgctgcgccttatccggtaactatcgtcttgagtccaacccggtaagacacgacttatcgccactggcagcagccactggtaacaggattagcagagcgaggtatgtaggcggtgctacagagttcttgaagtggtgggctaactacggctacactagaagaacagtatttggtatctgcgctctgctgaagccagttaccttcggaaaaagagttggtagctcttgatccggcaaacaaaccaccgctggtagcggtggtttttttgtttgcaagcagcagattacgcgcagaaaaaaaggatctcaagaagatcctttgatcttttctacggggtctgacgctcagtggaacgacgcgcgcgtaactcacgttaagggattttggtcatgagttagaaaaactcatcgagcatcaaatgaaactgcaatttattcatatcaggattatcaataccatatttttgaaaaagccgtttctgtaatgaaggagaaaactcaccgaggcagttccataggatggcaagatcctggtatcggtctgcgattccgactcgtccaacatcaatacaacctattaatttcccctcgtcaaaaataaggttatcaagtgagaaatcaccatgagtgacgactgaatccggtgagaatggcaaaagtttatgcatttctttccagacttgttcaacaggccagccattacgctcgtcatcaaaatcactcgcatcaaccaaaccgttattcattcgtgattgcgcctgagcgaggcgaaatacgcgatcgctgttaaaaggacaattacaaacaggaatcgagtgcaaccggcgcaggaacactgccagcgcatcaacaatattttcacctgaatcaggatattcttctaatacctggaacgctgtttttccggggatcgcagtggtgagtaaccatgcatcatcaggagtacggataaaatgcttgatggtcggaagtggcataaattccgtcagccagtttagtctgaccatctcatctgtaacatcattggcaacgctacctttgccatgtttcagaaacaactctggcgcatcgggcttcccatacaagcgatagattgtcgcacctgattgcccgacattatcgcgagcccatttatacccatataaatcagcatccatgttggaatttaatcgcggcctcgacgtttcccgttggatatggctcattttttacttcctcaccttgtcgtattatactatgccgatatactatgccgatgattaattgtcgacactgcgggggctctggcgcgccgtttaaacttaaccctcatattatgttaagggtcaatttgacccatttcagtttttggtttgaccaaagaactggttatcctttctttttcttcacgaaagttggtgacttttcctcatctagggtcatgaacttgtgtgtaaaatctggatactgtgaagtgtcgtggaatgtctgtgaacagtttgtatacaaagatgatgttgcgggtcattttgacccacacactttgatgtgagcaagtagctgtccagatccgaaataaacatgtctctttgatgcactttattttgattgctaaattatttatattttgactgtctctgaatagaccttcagatcagagactcaggtgtgtgtgggggaggagctttctctcccttgtccttgtcactgttctcgtgtcatctctttgagaaacagcaaaactgtctaactggtccgatccttaacctttaactgctgaggtgggggcttttcgagcctagcgaaagtgaaattgttcccctcctcccttcccccgcgcgcgacaaacccgtaacttctagtagcttcgatgttagttgcgcctaggccgtcagaagcttcgcacgtgttttcgtgcgcaattcggtaagtaaattcaatttgaaatttgtcgcgggcttcttaggccccacctcagtgtttacgtaacttttttgtaaatagtttcgattaagttattgtgttttttttttgcagtagcttgaaaacgtttgaaaaggctgagttgacgtatctgtttaacccttggcatgcctggtagggtttattagacccaccactttgaaaaacctatgatatttttttaaattgaaggctattgttgacgtgtgttatagtagcttcgcgcaataaaccggcggccattttgacgagcgaacttcagtctcacgtgagcgtgcgtgcgagtagcacgtgtgtaaagtgcgcgcgggcccgtgggaccctaccaggcatacaacgtaacattctgtcggtaagaatattttctttattttttggcatttctttgtttaatgtgttaaattataatacgaaaaaaatattgttgcagtagaagctagcgcgagctcacggggacagcccccccccaaagcccccagggatgtaattacgtccctcccccgctagggggcagcagcgagccgcccggggctccgctccggtccggcgctccccccgcatccccgagccggcagcgtgcggggacagcccgggcacggggaaggtggcacgggatcgctttcctctgaacgcttctcgctgctctttgagcctgcagacacctggggggatacggggaaaaagctttaggctgaaagagagatttagaatgacagaatcatagaacggcctgggttgcaaaggagcacagtgctcatccagatccaaccccctgctatgtgcagggtcatcaaccagcagcccaggctgcccagagccacatccagcctggccttgaatgcctgcagggatggggcatccacagcctccttgggcaacctgttcagtgcgtcaccaccctctgggggaaaaactgcctcctcatatccaacccaaacctcccctgtctcagtgtaaagccattcccccttgtcctatcaagggggagtttgctgtgacattgttggtctggggtgacacatgtttgccaattcagtgcatcacggagaggcagatcttggggataaggaagtgcaggacagcatggacgtgggacatgctggtgttgagggctctgggacactctccaagtcacagcgttcagaacagccttaaggataagaagataggatagaaggacaaagagcaagttaaaacccagcatggagaggagcacaaaaaggccacagacactgctggtccctgtgtctgagcctgcatgtttgatggtgtctggatgcaagcagaaggggtggaagtgcttgcctggagagatacagctgggtcagtaggactgggacaggcagctggagaattgccatgtagatgttcatacaatcgtcaaatcatgaaggctggaaaagccctccaagatccccaagaccaaccccaacccacccaccgtgcccactggccatgtccctcagtgccacatccccacagttcttcatcacctccagggacggtgacccccccacctccgtgggcagctgtgccactgcagcaccgctctttggagaaggtaaatcttgctaaatccagcccgaccctcccctggcacaacgtaaggccattatctctcatccaactccaggacggagtcagtgagaatattggtaccggggtgtggtaagcaggttttctttatgttttaaatgcactgacctcccacattccctttttagtaaaatattcagaaataatttaaatacatcattgcaatgaaaataaatgttttttattaggcagaatccagatgctcaaggcccttcataatatcccccagtttagtagttggacttagggaacaaaggaacctttaatagaaattggacagcaagaaagcgagtcatcagaagaactcgtcaagaaggcgatagaaggcgatgcgctgcgaatcgggagcggcgataccgtaaagcacgaggaagcggtcagcccattcgccgccaagttcctcagcaatatcacgggtagccaacgctatgtcctgatagcggtccgccacacccagccggccacagtcgatgaatccagaaaagcggccattttccaccatgatattcggcaagcaggcatcgccatgggtcacgacgagatcctcgccgtcgggcatgcgcgccttgagcctggcgaacagttcggctggcgcgagcccctgatgttcctcgtccagatcatcctgatcgacaagaccggcttccatccgagtacgtgctcgctcgatgcgatgtttcgcttggtggtcgaatgggcatgtagccggatcaagcgtatgcagccgccgcattgcatcagccatgatggatactttctcggcaggagcaaggtgagatgacaggagatcctgccccggcacttcgcccaatagcagccagtcccttcccgcttcagtgacaacgtcgagcacagctgcgcaaggaacgcccgtcgtggccagccacgatagccgcgctgcctcgtcctgcagttcattcagggcaccggacaggtcggtcttgacaaaaagaaccgggcgcccctgcgctgacagccggaacacggcggcatcagagcagccgattgtctgttgtgcccagtcatagccgaatagcctctccacccaagcggccggagaaccagcgtgcaatccatcttgttcaatcatgccaccctgcagagtcgctctgtgttcgaggccacacgcgtcaccttaatatgcgaagtggacctgggaccgcgccgccccgactgcatctgcgtgttttcgccaatgacaagacgctgggcggggtttgtgtcatcatagaactaaagacatgcaaatatatttcttccggggacaccgccagcaaacgcgagcaacgggccacggggatgaagcagctggaaacttgatctgtcgccgcaattcaaacttcgtgaggctccggtgcccgtcagtgacctgctatactctggagacgtctaccgggtaggggaggcgcttttcccaaggcagtctggagcatgcgctttagcagccccgctgggcacttggcgctacacaagtggcctctggcctcgcacacattccacatccaccggtaggcgccaaccggctccgttctttggtggccccttcgcgccaccttctactcctcccctagtcaggaagttcccccccgccccgcagctcgcgtcgtgcaggacgtgacaaatggaagtagcacgactcactagtctcgtgcagatggacagcaccgctgagcaatggaagcgggtaggcctttggggcagcggccaatagcagctttgctccttcgctttctgagagcagcggccgggaaggggcggtgcgggaggcggggtgtggggcggtagtgtgggccctgttcctgcccgcgcggtgttccgcattctgcaagcctccggagcgcacgtccgtctcaggggcagcttgcttgttctttttgcagaagctcagaataaacgctcaactttggccgccacccctgtgtcaaaaggggaggaattgatcaaagagaaccctcatcctaaactgtaccctgagggaactgtcaacaatcaccacttcaaatgcacctcagagggcgagggaaagccctacgaagggacccagacccctcgcattaaggtggtcgaaggcggaccactcccttttgcattcgacatcctggctacctccttcccttacggatcgcgcacttttatcaagtacccgaaggggatcccggacttcttcaagcaatccttccctgagggattcacttgggaacgggtcacgacctacgaagatggaggcgtggtgaccgtgcctcaagacactagcctggaagatggctgccttgtctacaacgtgaagatcagaggtgtgaacttcccatccaatggccccgtgcctcagaaaaagactctggggtgggaagccaataccgaacctctctacccagcggacggaggactcgaaggccggtctgaccctgccctgaagctggtcggaggaggacatttgtcgtgtagctttgtgactacgtaccggtcgaagaagccggccaaaaacctgaagatgccgggtatccacgcggtggaccatagactggaacgcctggaggagagcgataacgagatgttcgtcgttcagagggaacacgctgtggcacgatattgcgatctcccgtcgaagcttggtcacaagctcaattaatg

SEQ ID NO: 598 - DNA, 681 bp, Artificial sequence; identical to SEQ ID NO: 230
  Synthetic sequence

SEQ ID NO: 599 - DNA, 681 bp, Artificial sequence; identical to SEQ ID NO: 235
  Synthetic sequence

SEQ ID NO: 600 - DNA, 839 bp, Artificial sequence; identical to SEQ ID NO: 240
  Synthetic sequence

SEQ ID NO: 601 - DNA, 681 bp, Artificial sequence; identical to SEQ ID NO: 239
  Synthetic sequence

SEQ ID NO: 602 - DNA, 6212 bp, Artificial sequence
  Synthetic sequence
ggtggcggccaaagttgagcgtttattctgagcttctaggaaaaagaagaaggaagctcccctgagacgggtcgctctttcttgggcaggatactgcagcgaggagctctgcgttctacggtggtcagacccaagactgcgacggtaccgacgctggtcgcgcctcttatacccacgtagaacgcagctcagccaatagaatgcgtgccaatatggaatttccaggggaaaaccggggcggtgttacgttttggctgccctttcacttcccattgacgtgtattggctcgagaacggtactttcccattaatcagctatgggaaagtaccgtttaaaggtcacgttgcattagtttcaatagcccattgacgtcaatggtgggaaagtacatggcgttttataaattggctggaaaaacccaatgactcacccctattgaccttatgtacgtgccaataatgggaaaaacccattgactcaccccctattgaccttttgtactgggcaaaacccaatggaaagtccctattgactcagtgtacttggctccaatgggactttcctgttgattcacccctattgaccttatgtactgggcaaaacccattggaaagtccctaatgactcagtatatggcggccagatcttggcctcggtggccgataaaccgtctccagagcagtcttccactgacgggcaccggagcctcacgaagtttgaattgcggcgacagatcaagtttctctaccgggtaggggaggcgcttttcccaaggcagtctggagcatgcgctttagcagccccgctgggcacttggcgctacacaagtggcctctggcctcgcacacattccacatccaccggtaggcgccaaccggctccgttctttggtggccccttcgcgccaccttctactcctcccctagtcaggaagttcccccccgccccgcagctcgcgtcgtgcaggacgtgacaaatggaagtagcacgactcactagtctcgtgcagatggacagcaccgctgagcaatggaagcgggtaggcctttggggcagcggccaatagcagctttgctccttcgctttctgagagcagcggccgggaaggggcggtgcgggaggcggggtgtggggcggtagtgtgggccctgttcctgcccgcgcggtgttccgcattctgcaagcctccggagcgcacgtcgccaccatggccacctcagcaagttcccacttgaacaaaaacatcaagcaaatgtacctgtgcctgccccagggtgagaaagtccaagccatgtatatctgggttgatggtactggagaaggactgcgctgcaaaacccgcaccctggactgtgagcccaagtgtgtagaagagttacctgagtggaattttgatggctctagtacctttcagtctgagggctccaacagtgacatgtatctcagccctgttgccatgtttcgggaccccttccgccgggagcccaacaagctggtgttctgtgaagttttcaagtacaaccggaagcctgcagagacaaatttaaggcactcctgtaaacggataatggacatggtgagcaaccagcacccctggtttggaatggaacaggagtatactctgatgggaacagatgggcacccttttggttggccttccaatggctttcctgggccccaaggtccgtattactgtggtgtgggcgcagacaaagcctatggcagggatatcgtggaggctcactaccgcgcctgcttgtatgctggggtcaagattacaggaacaaatgctgaggtcatgcctgcccagtgggagttccaaataggaccctgtgaaggaatccacatgggagatcatctctgggtggcccgtttcatcttgcatcgagtatgtgaggactttggggtaatagcaacctttgaccccaagcccattcctgggaactggaatggtgcaggctgccataccaactttagcaccaaggccatgcgggaggagaatggtctgaagcacatcgaggaggccatcgagaaactaagcaagcggcaccagtaccacattcgagcctacgatcccaaggggggcctggacaatgcccgtcgtctgactgggttccacgaaacgtccaacatcaacgacttttctgctggtgtcgccaatcgcagtgccagcatccgcattccccggactgtcggccaggagaagaaaggttactttgaagatcgccgcccctctgccaattgtgacccctttgcagtgacagaagccatcgtccgcacatgccttctcaatgagactggcgacgagcccttccaatacaaaaactggatccgctcagacatgataagatacattgatgagtttggacaaaccacaactagaatgcagtgatgatgatgaaaaatctgatcttctgaagaaaatatatttctttttattcatagctcttaactagtggtgatagcaatgtcagcagtgccttaaaataacacacaagagccatgtgaagccacagatgatggctcttgcgtgttattttcaagtaaggttgaccatactctactctagttatattctttaggcacgaatgtgtgtttaaaaaaaataaaaactagtggtgatagcaatgtcagcagtgcctttaaacagtaagtagtctctgggtgaagccacagatgccagagactaattactgtttacaagtaaggttgaccatactctactctagagttgtgttttaatgtatattaatgttactaatgtgtttactagtggtgatagcaatgtcagcagtgcctttgggtgttaataaaaaggcaggtgaagccacagatgctgcctttttcttaacacccacaagtaaggttgaccatactctactctaggttatttttagtatgattctgtaaaaatgaattaatactaactagtggtgatagcaatgtcagcagtgcctttcattttgacatacatacttggtgaagccacagatgcaagtatgtacgtcaaaatgacaagtaaggttgaccatactctactctagtcagttttattgatagtcttttcagtattattgataatcttggggctcgctttcttgctgtccaatttctattaaaggttcctttgttccctaagtccaactactaaactgggggatattatgaagggccttgagcatctggattctgcctaataaaaaacatttattttcattgcaatgatgtatttaaattatttctgaatattttactaaaaagggaatgtgggaggtcagtgcatttaaaacataaagaaagaagactacacaaaacataaagaaagacagcccccccggctcgttgcccagaggggctgtcatcgctagaaactctctgcagcggcggcacatgctgccgctgcagagagaagaattaaaatgccaacaacgtatgggacgcgtcgttggcatttaagcccttttactgccacgacgtatcccatgcgtcattggcagtaaaaaggttaagacctgcttaccacacagagcccccgcagtgtcgacaattaatcatcggcatagtatatcggcatagtataatacgacaaggtgaggaagtaaaaaatgagccatatccaacgggaaacgtcgaggccgcgattaaattccaacatggatgctgatttatatgggtataaatgggctcgcgataatgtcgggcaatcaggtgcgacaatctatcgcttgtatgggaagcccgatgcgccagagttgtttctgaaacatggcaaaggtagcgttgccaatgatgttacagatgagatggtcagactaaactggctgacggaatttatgccacttccgaccatcaagcattttatccgtactcctgatgatgcatggttactcaccactgcgatccccggaaaaacagcgttccaggtattagaagaatatcctgattcaggtgaaaatattgttgatgcgctggcagtgttcctgcgccggttgcactcgattcctgtttgtaattgtccttttaacagcgatcgcgtatttcgcctcgctcaggcgcaatcacgaatgaataacggtttggttgatgcgagtgattttgatgacgagcgtaatggctggcctgttgaacaagtctggaaagaaatgcataaacttttgccattctcaccggattcagtcgtcactcatggtgatttctcacttgataaccttatttttgacgaggggaaattaataggttgtattgatgttggacgagtcggaatcgcagaccgataccaggatcttgccatcctatggaactgcctcggtgagttttctccttcattacagaaacggctttttcaaaaatatggtattgataatcctgatatgaataaattgcagtttcatttgatgctcgatgagtttttctaactcatgaccaaaatcccttaacgtgagttacgcgcgcgtcgttccactgagcgtcagaccccgtagaaaagatcaaaggatcttcttgagatcctttttttctgcgcgtaatctgctgcttgcaaacaaaaaaaccaccgctaccagcggtggtttgtttgccggatcaagagctaccaactctttttccgaaggtaactggcttcagcagagcgcagataccaaatactgttcttctagtgtagccgtagttagcccaccacttcaagaactctgtagcaccgcctacatacctcgctctgctaatcctgttaccagtggctgctgccagtggcgataagtcgtgtcttaccgggttggactcaagacgatagttaccggataaggcgcagcggtcgggctgaacggggggttcgtgcacacagcccagcttggagcgaacgacctacaccgaactgagatacctacagcgtgagctatgagaaagcgccacgcttcccgaagggagaaaggcggacaggtatccggtaagcggcagggtcggaacaggagagcgcacgagggagcttccagggggaaacgcctggtatctttatagtcctgtcgggtttcgccacctctgacttgagcgtcgatttttgtgatgctcgtcaggggggcggagcctatggaaaaacgccagcaacgcggcctttttacggttcctggccttttgctggccttttgctcacatgttctttcctgcgttatcccctgattctgtggataaccgtattaccgcctttgagtgagctgataccgcttaacccttttactgccagccgttttggtcaaagtggaacttgtattgccagacagtttttgaacgttttgcactgtttcactttaggggcctttcctcgaggggacttttagtttacccaggaaaacaatatattgtttttttcagaacaacctaagctttcaaaatatggtagaatttttgtgtaattccaattctgtaacaagatataggcttctaaatgtctaaaaatgcaaagcctgctattgtcttgccaatcctcccccttgctgtcctgccccaccccaccccccagaatagaatgacacctactcagacaatgcgatgcaatttcctcattttattaggaaaggacagtgggagtggcaccttccagggtcaaggaaggcacgggggaggggcaaacaacagatggctggcaattttattatcagtttctcaggtaacccgtcagccgattaatgaagtagaaattgcgcaggatctcgacgcgcacaatagtccaggcgcagtgcgagtattccttggccttcaggtagtgcagaatgcggccgtaatagcgcttcaggtggagggaggacatgagctttcccctagtaaaatcttctttctcgagcttttcctcaagcacggtcttgagatggttgatctggtggtacacgttagccaggaggttctccacgatggtttcgttccagccagtgcttgagctgtcttgtctaaagatcgcgaaaatgttctggagcatttcgtagatggtcagggcggcatcttccttctggaactgctgcagctgcttgatctcttccgggatgtcgaagttcatccggtctttcaggcagtactccagccgcccgttcaactgccacagcagcttttggcactggaagttgctggaccgttgcaggaatcccaacaggttgtaggacatggaaagagctgtagtggagaagcacaacaggagagcaatttggaggagacacttgttggtcat

SEQ ID NO: 603 - DNA, 6212 bp, Artificial sequence
  Synthetic sequence
ggtggcggccaaagttgagcgtttattctgagcttctaggaaaaagaagaaggaagctcccctgagacgggtcgctctttcttgggcaggatactgcagcgaggagctctgcgttctacggtggtcagacccaagactgcgacggtaccgacgctggtcgcgcctcttatacccacgtagaacgcagctcagccaatagaatgcgtgccaatatggaatttccaggggaaaaccggggcggtgttacgttttggctgccctttcacttcccattgacgtgtattggctcgagaacggtactttcccattaatcagctatgggaaagtaccgtttaaaggtcacgttgcattagtttcaatagcccattgacgtcaatggtgggaaagtacatggcgttttataaattggctggaaaaacccaatgactcacccctattgaccttatgtacgtgccaataatgggaaaaacccattgactcaccccctattgaccttttgtactgggcaaaacccaatggaaagtccctattgactcagtgtacttggctccaatgggactttcctgttgattcacccctattgaccttatgtactgggcaaaacccattggaaagtccctaatgactcagtatatggcggccagatcttggcctcggtggccgataaaccgtctccagagcagtcttccactgacgggcaccggagcctcacgaagtttgaattgcggcgacagatcaagtttctctaccgggtaggggaggcgcttttcccaaggcagtctggagcatgcgctttagcagccccgctgggcacttggcgctacacaagtggcctctggcctcgcacacattccacatccaccggtaggcgccaaccggctccgttctttggtggccccttcgcgccaccttctactcctcccctagtcaggaagttcccccccgccccgcagctcgcgtcgtgcaggacgtgacaaatggaagtagcacgactcactagtctcgtgcagatggacagcaccgctgagcaatggaagcgggtaggcctttggggcagcggccaatagcagctttgctccttcgctttctgagagcagcggccgggaaggggcggtgcgggaggcggggtgtggggcggtagtgtgggccctgttcctgcccgcgcggtgttccgcattctgcaagcctccggagcgcacgtcgccaccatggccacctcagcaagttcccacttgaacaaaaacatcaagcaaatgtacctgtgcctgccccagggtgagaaagtccaagccatgtatatctgggttgatggtactggagaaggactgcgctgcaaaacccgcaccctggactgtgagcccaagtgtgtagaagagttacctgagtggaattttgatggctctagtacctttcagtctgagggctccaacagtgacatgtatctcagccctgttgccatgtttcgggaccccttccgccgggagcccaacaagctggtgttctgtgaagttttcaagtacaaccggaagcctgcagagacaaatttaaggcactcctgtaaacggataatggacatggtgagcaaccagcacccctggtttggaatggaacaggagtatactctgatgggaacagatgggcacccttttggttggccttccaatggctttcctgggccccaaggtccgtattactgtggtgtgggcgcagacaaagcctatggcagggatatcgtggaggctcactaccgcgcctgcttgtatgctggggtcaagattacaggaacaaatgctgaggtcatgcctgcccagtgggagttccaaataggaccctgtgaaggaatccacatgggagatcatctctgggtggcccgtttcatcttgcatcgagtatgtgaggactttggggtaatagcaacctttgaccccaagcccattcctgggaactggaatggtgcaggctgccataccaactttagcaccaaggccatgcgggaggagaatggtctgaagcacatcgaggaggccatcgagaaactaagcaagcggcaccagtaccacattcgagcctacgatcccaaggggggcctggacaatgcccgtcgtctgactgggttccacgaaacgtccaacatcaacgacttttctgctggtgtcgccaatcgcagtgccagcatccgcattccccggactgtcggccaggagaagaaaggttactttgaagatcgccgcccctctgccaattgtgacccctttgcagtgacagaagccatcgtccgcacatgccttctcaatgagactggcgacgagcccttccaatacaaaaactggatccgctcagacatgataagatacattgatgagtttggacaaaccacaactagaatgcagtgatgatgatgaaaaatctgatcttctgaagaaaatatatttctttttattcatagctcttaactagtggtgatagcaatgtcagcagtgcctaagactatcagcaagaaccagggtgaagccacagatgcctggttcttactgatagtctcaagtaaggttgaccatactctactctagttatattctttaggcacgaatgtgtgtttaaaaaaaataaaaactagtggtgatagcaatgtcagcagtgcctttgaagataactttgtccccgggtgaagccacagatgccggggacaacgttatcttcacaagtaaggttgaccatactctactctagagttgtgttttaatgtatattaatgttactaatgtgtttactagtggtgatagcaatgtcagcagtgccttaaacaacaatggatccccaaagtgaagccacagatgtttggggatcaattgttgtttcaagtaaggttgaccatactctactctaggttatttttagtatgattctgtaaaaatgaattaatactaactagtggtgatagcaatgtcagcagtgcctttgctcatgattgtgaaccaaagtgaagccacagatgtttggttcaccatcatgagcacaagtaaggttgaccatactctactctagtcagttttattgatagtcttttcagtattattgataatcttggggctcgctttcttgctgtccaatttctattaaaggttcctttgttccctaagtccaactactaaactgggggatattatgaagggccttgagcatctggattctgcctaataaaaaacatttattttcattgcaatgatgtatttaaattatttctgaatattttactaaaaagggaatgtgggaggtcagtgcatttaaaacataaagaaagaagactacacaaaacataaagaaagacagcccccccggctcgttgcccagaggggctgtcatcgctagaaactctctgcagcggcggcacatgctgccgctgcagagagaagaattaaaatgccaacaacgtatgggacgcgtcgttggcatttaagcccttttactgccacgacgtatcccatgcgtcattggcagtaaaaaggttaagacctgcttaccacacagagcccccgcagtgtcgacaattaatcatcggcatagtatatcggcatagtataatacgacaaggtgaggaagtaaaaaatgagccatatccaacgggaaacgtcgaggccgcgattaaattccaacatggatgctgatttatatgggtataaatgggctcgcgataatgtcgggcaatcaggtgcgacaatctatcgcttgtatgggaagcccgatgcgccagagttgtttctgaaacatggcaaaggtagcgttgccaatgatgttacagatgagatggtcagactaaactggctgacggaatttatgccacttccgaccatcaagcattttatccgtactcctgatgatgcatggttactcaccactgcgatccccggaaaaacagcgttccaggtattagaagaatatcctgattcaggtgaaaatattgttgatgcgctggcagtgttcctgcgccggttgcactcgattcctgtttgtaattgtccttttaacagcgatcgcgtatttcgcctcgctcaggcgcaatcacgaatgaataacggtttggttgatgcgagtgattttgatgacgagcgtaatggctggcctgttgaacaagtctggaaagaaatgcataaacttttgccattctcaccggattcagtcgtcactcatggtgatttctcacttgataaccttatttttgacgaggggaaattaataggttgtattgatgttggacgagtcggaatcgcagaccgataccaggatcttgccatcctatggaactgcctcggtgagttttctccttcattacagaaacggctttttcaaaaatatggtattgataatcctgatatgaataaattgcagtttcatttgatgctcgatgagtttttctaactcatgaccaaaatcccttaacgtgagttacgcgcgcgtcgttccactgagcgtcagaccccgtagaaaagatcaaaggatcttcttgagatcctttttttctgcgcgtaatctgctgcttgcaaacaaaaaaaccaccgctaccagcggtggtttgtttgccggatcaagagctaccaactctttttccgaaggtaactggcttcagcagagcgcagataccaaatactgttcttctagtgtagccgtagttagcccaccacttcaagaactctgtagcaccgcctacatacctcgctctgctaatcctgttaccagtggctgctgccagtggcgataagtcgtgtcttaccgggttggactcaagacgatagttaccggataaggcgcagcggtcgggctgaacggggggttcgtgcacacagcccagcttggagcgaacgacctacaccgaactgagatacctacagcgtgagctatgagaaagcgccacgcttcccgaagggagaaaggcggacaggtatccggtaagcggcagggtcggaacaggagagcgcacgagggagcttccagggggaaacgcctggtatctttatagtcctgtcgggtttcgccacctctgacttgagcgtcgatttttgtgatgctcgtcaggggggcggagcctatggaaaaacgccagcaacgcggcctttttacggttcctggccttttgctggccttttgctcacatgttctttcctgcgttatcccctgattctgtggataaccgtattaccgcctttgagtgagctgataccgcttaacccttttactgccagccgttttggtcaaagtggaacttgtattgccagacagtttttgaacgttttgcactgtttcactttaggggcctttcctcgaggggacttttagtttacccaggaaaacaatatattgtttttttcagaacaacctaagctttcaaaatatggtagaatttttgtgtaattccaattctgtaacaagatataggcttctaaatgtctaaaaatgcaaagcctgctattgtcttgccaatcctcccccttgctgtcctgccccaccccaccccccagaatagaatgacacctactcagacaatgcgatgcaatttcctcattttattaggaaaggacagtgggagtggcaccttccagggtcaaggaaggcacgggggaggggcaaacaacagatggctggcaattttattatcagtttctcaggtaacccgtcagccgattaatgaagtagaaattgcgcaggatctcgacgcgcacaatagtccaggcgcagtgcgagtattccttggccttcaggtagtgcagaatgcggccgtaatagcgcttcaggtggagggaggacatgagctttcccctagtaaaatcttctttctcgagcttttcctcaagcacggtcttgagatggttgatctggtggtacacgttagccaggaggttctccacgatggtttcgttccagccagtgcttgagctgtcttgtctaaagatcgcgaaaatgttctggagcatttcgtagatggtcagggcggcatcttccttctggaactgctgcagctgcttgatctcttccgggatgtcgaagttcatccggtctttcaggcagtactccagccgcccgttcaactgccacagcagcttttggcactggaagttgctggaccgttgcaggaatcccaacaggttgtaggacatggaaagagctgtagtggagaagcacaacaggagagcaatttggaggagacacttgttggtcat

SEQ ID NO: 604 - DNA, 6370 bp, Artificial sequence
  Synthetic sequence
ggtggcggccaaagttgagcgtttattctgagcttctaggaaaaagaagaaggaagctcccctgagacgggtcgctctttcttgggcaggatactgcagcgaggagctctgcgttctacggtggtcagacccaagactgcgacggtaccgacgctggtcgcgcctcttatacccacgtagaacgcagctcagccaatagaatgcgtgccaatatggaatttccaggggaaaaccggggcggtgttacgttttggctgccctttcacttcccattgacgtgtattggctcgagaacggtactttcccattaatcagctatgggaaagtaccgtttaaaggtcacgttgcattagtttcaatagcccattgacgtcaatggtgggaaagtacatggcgttttataaattggctggaaaaacccaatgactcacccctattgaccttatgtacgtgccaataatgggaaaaacccattgactcaccccctattgaccttttgtactgggcaaaacccaatggaaagtccctattgactcagtgtacttggctccaatgggactttcctgttgattcacccctattgaccttatgtactgggcaaaacccattggaaagtccctaatgactcagtatatggcggccagatcttggcctcggtggccgataaaccgtctccagagcagtcttccactgacgggcaccggagcctcacgaagtttgaattgcggcgacagatcaagtttctctaccgggtaggggaggcgcttttcccaaggcagtctggagcatgcgctttagcagccccgctgggcacttggcgctacacaagtggcctctggcctcgcacacattccacatccaccggtaggcgccaaccggctccgttctttggtggccccttcgcgccaccttctactcctcccctagtcaggaagttcccccccgccccgcagctcgcgtcgtgcaggacgtgacaaatggaagtagcacgactcactagtctcgtgcagatggacagcaccgctgagcaatggaagcgggtaggcctttggggcagcggccaatagcagctttgctccttcgctttctgagagcagcggccgggaaggggcggtgcgggaggcggggtgtggggcggtagtgtgggccctgttcctgcccgcgcggtgttccgcattctgcaagcctccggagcgcacgtcgccaccatggccacctcagcaagttcccacttgaacaaaaacatcaagcaaatgtacctgtgcctgccccagggtgagaaagtccaagccatgtatatctgggttgatggtactggagaaggactgcgctgcaaaacccgcaccctggactgtgagcccaagtgtgtagaagagttacctgagtggaattttgatggctctagtacctttcagtctgagggctccaacagtgacatgtatctcagccctgttgccatgtttcgggaccccttccgccgggagcccaacaagctggtgttctgtgaagttttcaagtacaaccggaagcctgcagagacaaatttaaggcactcctgtaaacggataatggacatggtgagcaaccagcacccctggtttggaatggaacaggagtatactctgatgggaacagatgggcacccttttggttggccttccaatggctttcctgggccccaaggtccgtattactgtggtgtgggcgcagacaaagcctatggcagggatatcgtggaggctcactaccgcgcctgcttgtatgctggggtcaagattacaggaacaaatgctgaggtcatgcctgcccagtgggagttccaaataggaccctgtgaaggaatccacatgggagatcatctctgggtggcccgtttcatcttgcatcgagtatgtgaggactttggggtaatagcaacctttgaccccaagcccattcctgggaactggaatggtgcaggctgccataccaactttagcaccaaggccatgcgggaggagaatggtctgaagcacatcgaggaggccatcgagaaactaagcaagcggcaccagtaccacattcgagcctacgatcccaaggggggcctggacaatgcccgtcgtctgactgggttccacgaaacgtccaacatcaacgacttttctgctggtgtcgccaatcgcagtgccagcatccgcattccccggactgtcggccaggagaagaaaggttactttgaagatcgccgcccctctgccaattgtgacccctttgcagtgacagaagccatcgtccgcacatgccttctcaatgagactggcgacgagcccttccaatacaaaaactggatccgctcagacatgataagatacattgatgagtttggacaaaccacaactagaatgcagtgatgatgatgaaaaatctgatcttctgaagaaaatatatttctttttattcatagctcttaactagtggtgatagcaatgtcagcagtgcctaagactatcagcaagaaccagggtgaagccacagatgcctggttcttactgatagtctcaagtaaggttgaccatactctactctagttatattctttaggcacgaatgtgtgtttaaaaaaaataaaaactagtggtgatagcaatgtcagcagtgccttaaaataacacacaagagccatgtgaagccacagatgatggctcttgcgtgttattttcaagtaaggttgaccatactctactctagagttgtgttttaatgtatattaatgttactaatgtgtttactagtggtgatagcaatgtcagcagtgcctttgaagataactttgtccccgggtgaagccacagatgccggggacaacgttatcttcacaagtaaggttgaccatactctactctaggttatttttagtatgattctgtaaaaatgaattaatactaactagtggtgatagcaatgtcagcagtgcctttaaacagtaagtagtctctgggtgaagccacagatgccagagactaattactgtttacaagtaaggttgaccatactctactctagatttttcagatgtatcatctcttaaaatactgtaattgcaactagtggtgatagcaatgtcagcagtgccttaaacaacaatggatccccaaagtgaagccacagatgtttggggatcaattgttgtttcaagtaaggttgaccatactctactctagtcagttttattgatagtcttttcagtattattgataatcttggggctcgctttcttgctgtccaatttctattaaaggttcctttgttccctaagtccaactactaaactgggggatattatgaagggccttgagcatctggattctgcctaataaaaaacatttattttcattgcaatgatgtatttaaattatttctgaatattttactaaaaagggaatgtgggaggtcagtgcatttaaaacataaagaaagaagactacacaaaacataaagaaagacagcccccccggctcgttgcccagaggggctgtcatcgctagaaactctctgcagcggcggcacatgctgccgctgcagagagaagaattaaaatgccaacaacgtatgggacgcgtcgttggcatttaagcccttttactgccacgacgtatcccatgcgtcattggcagtaaaaaggttaagacctgcttaccacacagagcccccgcagtgtcgacaattaatcatcggcatagtatatcggcatagtataatacgacaaggtgaggaagtaaaaaatgagccatatccaacgggaaacgtcgaggccgcgattaaattccaacatggatgctgatttatatgggtataaatgggctcgcgataatgtcgggcaatcaggtgcgacaatctatcgcttgtatgggaagcccgatgcgccagagttgtttctgaaacatggcaaaggtagcgttgccaatgatgttacagatgagatggtcagactaaactggctgacggaatttatgccacttccgaccatcaagcattttatccgtactcctgatgatgcatggttactcaccactgcgatccccggaaaaacagcgttccaggtattagaagaatatcctgattcaggtgaaaatattgttgatgcgctggcagtgttcctgcgccggttgcactcgattcctgtttgtaattgtccttttaacagcgatcgcgtatttcgcctcgctcaggcgcaatcacgaatgaataacggtttggttgatgcgagtgattttgatgacgagcgtaatggctggcctgttgaacaagtctggaaagaaatgcataaacttttgccattctcaccggattcagtcgtcactcatggtgatttctcacttgataaccttatttttgacgaggggaaattaataggttgtattgatgttggacgagtcggaatcgcagaccgataccaggatcttgccatcctatggaactgcctcggtgagttttctccttcattacagaaacggctttttcaaaaatatggtattgataatcctgatatgaataaattgcagtttcatttgatgctcgatgagtttttctaactcatgaccaaaatcccttaacgtgagttacgcgcgcgtcgttccactgagcgtcagaccccgtagaaaagatcaaaggatcttcttgagatcctttttttctgcgcgtaatctgctgcttgcaaacaaaaaaaccaccgctaccagcggtggtttgtttgccggatcaagagctaccaactctttttccgaaggtaactggcttcagcagagcgcagataccaaatactgttcttctagtgtagccgtagttagcccaccacttcaagaactctgtagcaccgcctacatacctcgctctgctaatcctgttaccagtggctgctgccagtggcgataagtcgtgtcttaccgggttggactcaagacgatagttaccggataaggcgcagcggtcgggctgaacggggggttcgtgcacacagcccagcttggagcgaacgacctacaccgaactgagatacctacagcgtgagctatgagaaagcgccacgcttcccgaagggagaaaggcggacaggtatccggtaagcggcagggtcggaacaggagagcgcacgagggagcttccagggggaaacgcctggtatctttatagtcctgtcgggtttcgccacctctgacttgagcgtcgatttttgtgatgctcgtcaggggggcggagcctatggaaaaacgccagcaacgcggcctttttacggttcctggccttttgctggccttttgctcacatgttctttcctgcgttatcccctgattctgtggataaccgtattaccgcctttgagtgagctgataccgcttaacccttttactgccagccgttttggtcaaagtggaacttgtattgccagacagtttttgaacgttttgcactgtttcactttaggggcctttcctcgaggggacttttagtttacccaggaaaacaatatattgtttttttcagaacaacctaagctttcaaaatatggtagaatttttgtgtaattccaattctgtaacaagatataggcttctaaatgtctaaaaatgcaaagcctgctattgtcttgccaatcctcccccttgctgtcctgccccaccccaccccccagaatagaatgacacctactcagacaatgcgatgcaatttcctcattttattaggaaaggacagtgggagtggcaccttccagggtcaaggaaggcacgggggaggggcaaacaacagatggctggcaattttattatcagtttctcaggtaacccgtcagccgattaatgaagtagaaattgcgcaggatctcgacgcgcacaatagtccaggcgcagtgcgagtattccttggccttcaggtagtgcagaatgcggccgtaatagcgcttcaggtggagggaggacatgagctttcccctagtaaaatcttctttctcgagcttttcctcaagcacggtcttgagatggttgatctggtggtacacgttagccaggaggttctccacgatggtttcgttccagccagtgcttgagctgtcttgtctaaagatcgcgaaaatgttctggagcatttcgtagatggtcagggcggcatcttccttctggaactgctgcagctgcttgatctcttccgggatgtcgaagttcatccggtctttcaggcagtactccagccgcccgttcaactgccacagcagcttttggcactggaagttgctggaccgttgcaggaatcccaacaggttgtaggacatggaaagagctgtagtggagaagcacaacaggagagcaatttggaggagacacttgttggtcat

SEQ ID NO: 605 - DNA, 6385 bp, Artificial sequence
  Synthetic sequence
ggtggcggccaaagttgagcgtttattctgagcttctaggaaaaagaagaaggaagctcccctgagacgggtcgctctttcttgggcaggatactgcagcgaggagctctgcgttctacggtggtcagacccaagactgcgacggtaccgacgctggtcgcgcctcttatacccacgtagaacgcagctcagccaatagaatgcgtgccaatatggaatttccaggggaaaaccggggcggtgttacgttttggctgccctttcacttcccattgacgtgtattggctcgagaacggtactttcccattaatcagctatgggaaagtaccgtttaaaggtcacgttgcattagtttcaatagcccattgacgtcaatggtgggaaagtacatggcgttttataaattggctggaaaaacccaatgactcacccctattgaccttatgtacgtgccaataatgggaaaaacccattgactcaccccctattgaccttttgtactgggcaaaacccaatggaaagtccctattgactcagtgtacttggctccaatgggactttcctgttgattcacccctattgaccttatgtactgggcaaaacccattggaaagtccctaatgactcagtatatggcggccagatcttggcctcggtggccgataaaccgtctccagagcactgacgggcaccggagcctcacgaagtttgaattgcggcgacagatcaagtttctctaccgggtaggggaggcgcttttcccaaggcagtctggagcatgcgctttagcagccccgctgggcacttggcgctacacaagtggcctctggcctcgcacacattccacatccaccggtaggcgccaaccggctccgttctttggtggccccttcgcgccaccttctactcctcccctagtcaggaagttcccccccgccccgcagctcgcgtcgtgcaggacgtgacaaatggaagtagcacgactcactagtctcgtgcagatggacagcaccgctgagcaatggaagcgggtaggcctttggggcagcggccaatagcagctttgctccttcgctttctgggctcaggggcggggcgggcgcccgaaggtcctccggaggcccggcattctgcacgcttcaaaagcgcacgtctgccgcgctgttctcctcttcctcatctccgggcctttcgtcggacacaagacaggcttgcgccaccatggttgagaataccactttatcccgcgtcagggagaggcagtgcgtaaaaagacgcggaaccatgtgaaatactggtttttagtgcgccagatctctataatctcgcgcaacctattttcccctcgaacactttttaagccgtagataaacaggctgggattttttatggccacctcagcaagttcccacttgaacaaaaacatcaagcaaatgtacctgtgcctgccccagggtgagaaagtccaagccatgtatatctgggttgatggtactggagaaggactgcgctgcaaaacccgcaccctggactgtgagcccaagtgtgtagaagagttacctgagtggaattttgatggctctagtacctttcagtctgagggctccaacagtgacatgtatctcagccctgttgccatgtttcgggaccccttccgccgggagcccaacaagctggtgttctgtgaagttttcaagtacaaccggaagcctgcagagacaaatttaaggcactcctgtaaacggataatggacatggtgagcaaccagcacccctggtttggaatggaacaggagtatactctgatgggaacagatgggcacccttttggttggccttccaatggctttcctgggccccaaggtccgtattactgtggtgtgggcgcagacaaagcctatggcagggatatcgtggaggctcactaccgcgcctgcttgtatgctggggtcaagattacaggaacaaatgctgaggtcatgcctgcccagtgggagttccaaataggaccctgtgaaggaatccacatgggagatcatctctgggtggcccgtttcatcttgcatcgagtatgtgaggactttggggtaatagcaacctttgaccccaagcccattcctgggaactggaatggtgcaggctgccataccaactttagcaccaaggccatgcgggaggagaatggtctgaagcacatcgaggaggccatcgagaaactaagcaagcggcaccagtaccacattcgagcctacgatcccaaggggggcctggacaatgcccgtcgtctgactgggttccacgaaacgtccaacatcaacgacttttctgctggtgtcgccaatcgcagtgccagcatccgcattccccggactgtcggccaggagaagaaaggttactttgaagatcgccgcccctctgccaattgtgacccctttgcagtgacagaagccatcgtccgcacatgccttctcaatgagactggcgacgagcccttccaatacaaaaactggatccgctcagacatgataagatacattgatgagtttggacaaaccacaactagaatgcagtgatgatgatgaaaaatctgatcttctgaagaaaatatatttctttttattcatagctcttaactagtggtgatagcaatgtcagcagtgccttagtgtagacaacagtacctctgtgaagccacagatgagaggtactattgtctacactcaagtaaggttgaccatactctactctagttatattctttaggcacgaatgtgtgtttaaaaaaaataaaaactagtggtgatagcaatgtcagcagtgcctttccacgtctgtcttgtcctacgtgaagccacagatggtaggacaagccagacgtggacaagtaaggttgaccatactctactctagagttgtgttttaatgtatattaatgttactaatgtgtttactagtggtgatagcaatgtcagcagtgccttaaacaacaatggatccccaaagtgaagccacagatgtttggggatcaattgttgtttcaagtaaggttgaccatactctactctaggttatttttagtatgattctgtaaaaatgaattaatactaactagtggtgatagcaatgtcagcagtgccttaacacagtaccgccttagtgcgtgaagccacagatggcactaaggcagtactgtgttcaagtaaggttgaccatactctactctagtcagttttattgatagtcttttcagtattattgataatcttggggctcgctttcttgctgtccaatttctattaaaggttcctttgttccctaagtccaactactaaactgggggatattatgaagggccttgagcatctggattctgcctaataaaaaacatttattttcattgcaatgatgtatttaaattatttctgaatattttactaaaaagggaatgtgggaggtcagtgcatttaaaacataaagaaacacaaaacataaagaaagacagcccccccggctcgttgcccagaggggctgtcatcgctagaaactctctgcagcggcggcacatgctgccgctgcagagagaagaattaaaatgccaacaacgtatgggacgcgtcgttggcatttaagcccttttactgccacgacgtatcccatgcgtcattggcagtaaaaaggttaagacctgcttaccacacagagcccccgcagtgtcgacaattaatcatcggcatagtatatcggcatagtataatacgacaaggtgaggaagtaaaaaatgagccatatccaacgggaaacgtcgaggccgcgattaaattccaacatggatgctgatttatatgggtataaatgggctcgcgataatgtcgggcaatcaggtgcgacaatctatcgcttgtatgggaagcccgatgcgccagagttgtttctgaaacatggcaaaggtagcgttgccaatgatgttacagatgagatggtcagactaaactggctgacggaatttatgccacttccgaccatcaagcattttatccgtactcctgatgatgcatggttactcaccactgcgatccccggaaaaacagcgttccaggtattagaagaatatcctgattcaggtgaaaatattgttgatgcgctggcagtgttcctgcgccggttgcactcgattcctgtttgtaattgtccttttaacagcgatcgcgtatttcgcctcgctcaggcgcaatcacgaatgaataacggtttggttgatgcgagtgattttgatgacgagcgtaatggctggcctgttgaacaagtctggaaagaaatgcataaacttttgccattctcaccggattcagtcgtcactcatggtgatttctcacttgataaccttatttttgacgaggggaaattaataggttgtattgatgttggacgagtcggaatcgcagaccgataccaggatcttgccatcctatggaactgcctcggtgagttttctccttcattacagaaacggctttttcaaaaatatggtattgataatcctgatatgaataaattgcagtttcatttgatgctcgatgagtttttctaactcatgaccaaaatcccttaacgtgagttacgcgcgcgtcgttccactgagcgtcagaccccgtagaaaagatcaaaggatcttcttgagatcctttttttctgcgcgtaatctgctgcttgcaaacaaaaaaaccaccgctaccagcggtggtttgtttgccggatcaagagctaccaactctttttccgaaggtaactggcttcagcagagcgcagataccaaatactgttcttctagtgtagccgtagttagcccaccacttcaagaactctgtagcaccgcctacatacctcgctctgctaatcctgttaccagtggctgctgccagtggcgataagtcgtgtcttaccgggttggactcaagacgatagttaccggataaggcgcagcggtcgggctgaacggggggttcgtgcacacagcccagcttggagcgaacgacctacaccgaactgagatacctacagcgtgagctatgagaaagcgccacgcttcccgaagggagaaaggcggacaggtatccggtaagcggcagggtcggaacaggagagcgcacgagggagcttccagggggaaacgcctggtatctttatagtcctgtcgggtttcgccacctctgacttgagcgtcgatttttgtgatgctcgtcaggggggcggagcctatggaaaaacgccagcaacgcggcctttttacggttcctggccttttgctggccttttgctcacatgttctttcctgcgttatcccctgattctgtggataaccgtattaccgcctttgagtgagctgataccgcttaacccttttactgccagccgttttggtcaaagtggaacttgtattgccagacagtttttgaacgttttgcactgtttcactttaggggcctttcctcgaggggacttttagtttacccaggaaaacaatatattgtttttttcagaacaacctaagctttcaaaatatggtagaatttttgtgtaattccaattctgtaacaagatataggcttctaaatgtctaaaaatgcaaagcctgctattgtcttgccaatcctcccccttgctgtcctgccccaccccaccccccagaatagaatgacacctactcagacaatgcgatgcaatttcctcattttattaggaaaggacagtgggagtggcaccttccagggtcaaggaaggcacgggggaggggcaaacaacagatggctggcaattttattatcagtttctcaggtaacccgtcagccgattaatgaagtagaaattgcgcaggatctcgacgcgcacaatagtccaggcgcagtgcgagtattccttggccttcaggtagtgcagaatgcggccgtaatagcgcttcaggtggagggaggacatgagctttcccctagtaaaatcttctttctcgagcttttcctcaagcacggtcttgagatggttgatctggtggtacacgttagccaggaggttctccacgatggtttcgttccagccagtgcttgagctgtcttgtctaaagatcgcgaaaatgttctggagcatttcgtagatggtcagggcggcatcttccttctggaactgctgcagctgcttgatctcttccgggatgtcgaagttcatccggtctttcaggcagtactccagccgcccgttcaactgccacagcagcttttggcactggaagttgctggaccgttgcaggaatcccaacaggttgtaggacatggaaagagctgtagtggagaagcacaacaggagagcaatttggaggagacacttgttggtcat

SEQ ID NO: 606 - DNA, 5848 bp, Artificial sequence
  Synthetic sequence
atgaccaacaagtgtctcctccaaattgctctcctgttgtgcttctccactacagctctttccatgtcctacaacctgttgggattcctgcaacggtccagcaacttccagtgccaaaagctgctgtggcagttgaacgggcggctggagtactgcctgaaagaccggatgaacttcgacatcccggaagagatcaagcagctgcagcagttccagaaggaagatgccgccctgaccatctacgaaatgctccagaacattttcgcgatctttagacaagacagctcaagcactggctggaacgaaaccatcgtggagaacctcctggctaacgtgtaccaccagatcaaccatctcaagaccgtgcttgaggaaaagctcgagaaagaagattttactaggggaaagctcatgtcctccctccacctgaagcgctattacggccgcattctgcactacctgaaggccaaggaatactcgcactgcgcctggactattgtgcgcgtcgagatcctgcgcaatttctacttcattaatcggctgacgggttacctgagaaactgataataaaattgccagccatctgttgtttgcccctcccccgtgccttccttgaccctggaaggtgccactcccactgtcctttcctaataaaatgaggaaattgcatcgcattgtctgagtaggtgtcattctattctggggggtggggtggggcaggacagcaagggggaggattggcaagacaatagcaggctttgcatttttagacatttagaagcctatatcttgttacagaattggaattacacaaaaattctaccatattttgaaagcttaggttgttctgaaaaaaacaatatattgttttcctgggtaaactaaaagtcccctcgaggaaaggcccctaaagtgaaacagtgcaaaacgttcaaaaactgtctggcaatacaagttccactttgaccaaaacggctggcagtaaaagggttaagcggtatcagctcactcaaaggcggtaatacggttatccacagaatcaggggataacgcaggaaagaacatgtgagcaaaaggccagcaaaaggccaggaaccgtaaaaaggccgcgttgctggcgtttttccataggctccgcccccctgacgagcatcacaaaaatcgacgctcaagtcagaggtggcgaaacccgacaggactataaagataccaggcgtttccccctggaagctccctcgtgcgctctcctgttccgaccctgccgcttaccggatacctgtccgcctttctcccttcgggaagcgtggcgctttctcatagctcacgctgtaggtatctcagttcggtgtaggtcgttcgctccaagctgggctgtgtgcacgaaccccccgttcagcccgaccgctgcgccttatccggtaactatcgtcttgagtccaacccggtaagacacgacttatcgccactggcagcagccactggtaacaggattagcagagcgaggtatgtaggcggtgctacagagttcttgaagtggtgggctaactacggctacactagaagaacagtatttggtatctgcgctctgctgaagccagttaccttcggaaaaagagttggtagctcttgatccggcaaacaaaccaccgctggtagcggtggtttttttgtttgcaagcagcagattacgcgcagaaaaaaaggatctcaagaagatcctttgatcttttctacggggtctgacgctcagtggaacgacgcgcgcgtaactcacgttaagggattttggtcatgagttagaaaaactcatcgagcatcaaatgaaactgcaatttattcatatcaggattatcaataccatatttttgaaaaagccgtttctgtaatgaaggagaaaactcaccgaggcagttccataggatggcaagatcctggtatcggtctgcgattccgactcgtccaacatcaatacaacctattaatttcccctcgtcaaaaataaggttatcaagtgagaaatcaccatgagtgacgactgaatccggtgagaatggcaaaagtttatgcatttctttccagacttgttcaacaggccagccattacgctcgtcatcaaaatcactcgcatcaaccaaaccgttattcattcgtgattgcgcctgagcgaggcgaaatacgcgatcgctgttaaaaggacaattacaaacaggaatcgagtgcaaccggcgcaggaacactgccagcgcatcaacaatattttcacctgaatcaggatattcttctaatacctggaacgctgtttttccggggatcgcagtggtgagtaaccatgcatcatcaggagtacggataaaatgcttgatggtcggaagtggcataaattccgtcagccagtttagtctgaccatctcatctgtaacatcattggcaacgctacctttgccatgtttcagaaacaactctggcgcatcgggcttcccatacaagcgatagattgtcgcacctgattgcccgacattatcgcgagcccatttatacccatataaatcagcatccatgttggaatttaatcgcggcctcgacgtttcccgttggatatggctcattttttacttcctcaccttgtcgtattatactatgccgatatactatgccgatgattaattgtcgacactgcgggggctctgtgtggtaagcaggtcttaacctttttactgccaatgacgcatgggatacgtcgtggcagtaaaagggcttaaatgccaacgacgcgtcccatacgttgttggcattttaattcttctctctgcagcggcagcatgtgccgccgctgcagagagtttctagcgatgacagcccctctgggcaacgagccgggggggctgtctttctttatgttttgtggtgtcttccagacatgataagatacattgatgagtttggacaaaccacaactagaatgcagtgaaaaaaatgctttatttgtgaaatttgtgatgctattgctttatttgtaaccattataagctgcaataaacaagttaacaacaacaattgcattcattttatgtttcaggttcagggggaggtgtgggaggttttttaaagcaagtaaaacctctacaaatgtggtatggctgattatgatctctagtcaaggcactatacatcaaatattccttattaacccctttacaaattaaaaagctaaaggtacacaatttttgagcatagttattaatagcagacactctatgcctgtgtggagtaagaaaaaacagtatgttatgattataactgttatgcctacttataaaggttacagaatatttttccataattttcttgtatagcagtgcagctttttcctttgtggtgtaaatagcaaagcaagcaagagttctattactaaacacagcatgactcaaaaaacttagcaattctgaaggaaagtccttgggatcttctacctttctcttcttttttggaggagtagaatgttgagagtcagcagtagcctcatcatcactagatggcatttcttctgagcaaaacaggttttcctcattaaaggcattccaccactgctcccattcatcagttccataggttggaatctaaaatacacaaacaattagaatcagtagtttaacacattatacacttaaaaattttatatttaccttagagctttaaatctctgtaggtagtttgtccaattatgtcacaccacagaagtaaggttccttcacaaagatctctctggggcggggtgggatgaactaggaaaggctcaagatcactcaaagtctaattattagtttttgtattggaagggctcgtcgccagtctcattgagaaggcatgtgcggacgatggcttctgtcactgcaaaggggtcacaattggcagaggggcggcgatcttcaaagtaacctttcttctcctggccgacagtccggggaatgcggatgctggcactgcgattggcgacaccagcagaaaagtcgttgatgttggacgtttcgtggaacccagtcagacgacgggcattgtccaggccccccttgggatcgtaggctcgaatgtggtactggtgccgcttgcttagtttctcgatggcctcctcgatgtgcttcagaccattctcctcccgcatggccttggtgctaaagttggtatggcagcctgcaccattccagttcccaggaatgggcttggggtcaaaggttgctattaccccaaagtcctcacatactcgatgcaagatgaaacgggccacccagagatgatctcccatgtggattccttcacagggtcctatttggaactcccactgggcaggcatgacctcagcatttgttcctgtaatcttgaccccagcatacaagcaggcgcggtagtgagcctccacgatatccctgccataggctttgtctgcgcccacaccacagtaatacggaccttggggcccaggaaagccattggaaggccaaccaaaagggtgcccatctgttcccatcagagtatactcctgttccattccaaaccaggggtgctggttgctcaccatgtccattatccgtttacaggagtgccttaaatttgtctctgcaggcttccggttgtacttgaaaacttcacagaacaccagcttgttgggctcccggcggaaggggtcccgaaacatggcaacagggctgagatacatgtcactgttggagccctcagactgaaaggtactagagccatcaaaattccactcaggtaactcttctacacacttgggctcacagtccagggtgcgggttttgcagcgcagtccttctccagtaccatcaacccagatatacatggcttggactttctcaccctggggcaggcacaggtacatttgcttgatgtttttgttcaagtgggaacttgctgaggtggccatgccaccctgcagagtcgctctgtgttcgaggccacacgcgtcaccttaatatgcgaagtggacctgggaccgcgccgccccgactgcatctgcgtgttttcgccaatgacaagacgctgggcggggtttgtgtcatcatagaactaaagacatgcaaatatatttcttccggggacaccgccagcaaacgcgagcaacgggccacggggatgaagcagctggaagactactctggagacggtttatcggccaccgaggccaagatctggccgccatatactgagtcattagggactttccaatgggttttgcccagtacataaggtcaataggggtgaatcaacaggaaagtcccattggagccaagtacactgagtcaatagggactttccattgggttttgcccagtacaaaaggtcaatagggggtgagtcaatgggtttttcccattattggcacgtacataaggtcaataggggtgagtcattgggtttttccagccaatttataaaacgccatgtactttcccaccattgacgtcaatgggctattgaaactaatgcaacgtgacctttaaacggtactttcccatagctgattaatgggaaagtaccgttctcgagccaatacacgtcaatgggaagtgaaagggcagccaaaacgtaacaccgccccggttttcccctggaaattccatattggcacgcattctattggctgagctgcgttctacgtgggtataagaggcgcgaccagcgtcggtaccgtcgcagtcttgggtctgaccaccgtagaacgcagagctcctcgctgcagtatcctgcccaagaaagagcgacccgtctcaggggagcttccttcttctttttcctagaagctcagaataaacgctcaactttggccgccacc

SEQ ID NO: 607 - DNA, 22 bp, Artificial sequence
  Synthetic sequence
tggaagtacttgaattcgttcc

SEQ ID NO: 608 - DNA, 22 bp, Artificial sequence
  Synthetic sequence
aactatattaattctgtccttt

SEQ ID NO: 609 - DNA, 22 bp, Artificial sequence
  Synthetic sequence
ttggacttcaggaaggaccctt

SEQ ID NO: 610 - DNA, 22 bp, Artificial sequence
  Synthetic sequence
tcatagacttcaaatttatact

SEQ ID NO: 611 - DNA, 22 bp, Artificial sequence
  Synthetic sequence
ttgtaaaaatgcataattttag

SEQ ID NO: 612 - DNA, 22 bp, Artificial sequence
  Synthetic sequence
tacatcttcctaactatccctc

SEQ ID NO: 613 - DNA, 22 bp, Artificial sequence
  Synthetic sequence
tagagtacaacagttgcccagg

SEQ ID NO: 614 - DNA, 22 bp, Artificial sequence
  Synthetic sequence
taattgtttagaattatacagg

SEQ ID NO: 615 - DNA, 22 bp, Artificial sequence
  Synthetic sequence
ttgtacttattcatctagctcc

SEQ ID NO: 616 - DNA, 22 bp, Artificial sequence
  Synthetic sequence
taattttctttaaagtctgagt

SEQ ID NO: 617 - DNA, 22 bp, Artificial sequence
  Synthetic sequence
ggaacgaattaaagtacttccc

SEQ ID NO: 618 - DNA, 22 bp, Artificial sequence
  Synthetic sequence
aaaggacagacttaatatagtc

SEQ ID NO: 619 - DNA, 22 bp, Artificial sequence
  Synthetic sequence
aagggtccttactgaagtccac

SEQ ID NO: 620 - DNA, 22 bp, Artificial sequence
  Synthetic sequence
agtataaatctgaagtctatgc

SEQ ID NO: 621 - DNA, 22 bp, Artificial sequence
  Synthetic sequence
ctaaaattatacatttttacac

SEQ ID NO: 622 - DNA, 22 bp, Artificial sequence
  Synthetic sequence
gagggatagtcaggaagatgtc

SEQ ID NO: 623 - DNA, 22 bp, Artificial sequence
  Synthetic sequence
cctgggcaaccgttgtactctc

SEQ ID NO: 624 - DNA, 22 bp, Artificial sequence
  Synthetic sequence
cctgtataatcctaaacaattc

SEQ ID NO: 625 - DNA, 22 bp, Artificial sequence
  Synthetic sequence
ggagctagacgaataagtacac

SEQ ID NO: 626 - DNA, 22 bp, Artificial sequence
  Synthetic sequence
actcagacttcaaagaaaattc

SEQ ID NO: 627 - DNA, 681 bp, Artificial sequence
  Synthetic sequence
atctgatcttctgaagaaaatatatttctttttattcatagctcttaactagtggtgatagcaatgtcagcagtgccttacatcttcctaactatccctcgtgaagccacagatggagggatagtcaggaagatgtcaagtaaggttgaccatactctactctagttatattctttaggcacgaatgtgtgtttaaaaaaaataaaaactagtggtgatagcaatgtcagcagtgccttaactcatagatctaaagccaagtgaagccacagatgttggctttagctctatgagttcaagtaaggttgaccatactctactctagagttgtgttttaatgtatattaatgttactaatgtgtttactagtggtgatagcaatgtcagcagtgccttagagtacaacagttgcccagggtgaagccacagatgcctgggcaaccgttgtactctcaagtaaggttgaccatactctactctaggttatttttagtatgattctgtaaaaatgaattaatactaactagtggtgatagcaatgtcagcagtgcctttgtttagaattatacaggggcgtgaagccacagatggcccctgtatcattctaaacacaagtaaggttgaccatactctactctagtcagttttattgatagtcttttcagtattattgataatctt

SEQ ID NO: 628 - DNA, 22 bp, Artificial sequence
  Synthetic sequence
taatgcactaaaaagcttcagt

SEQ ID NO: 629 - DNA, 22 bp, Artificial sequence
  Synthetic sequence
taacttgacccctctatcccag

SEQ ID NO: 630 - DNA, 22 bp, Artificial sequence
  Synthetic sequence
aatttttgtactggaagggctc

SEQ ID NO: 631 - DNA, 22 bp, Artificial sequence
  Synthetic sequence
actgaagcttcttagtgcattc

SEQ ID NO: 632 - DNA, 22 bp, Artificial sequence
  Synthetic sequence
ctgggatagaagggtcaagttc

SEQ ID NO: 633 - DNA, 22 bp, Artificial sequence
  Synthetic sequence
gagcccttcccgtacaaaaatc

SEQ ID NO: 634 - DNA, 681 bp, Artificial sequence
  Synthetic sequence
atctgatcttctgaagaaaatatatttctttttattcatagctcttaactagtggtgatagcaatgtcagcagtgccttaatgcactaaaaagcttcagtgtgaagccacagatgactgaagcttcttagtgcattcaagtaaggttgaccatactctactctagttatattctttaggcacgaatgtgtgtttaaaaaaaataaaaactagtggtgatagcaatgtcagcagtgccttaaagtactagagccatcgaaagtgaagccacagatgtttcgatggccctagtactttcaagtaaggttgaccatactctactctagagttgtgttttaatgtatattaatgttactaatgtgtttactagtggtgatagcaatgtcagcagtgccttaacttgacccctctatcccaggtgaagccacagatgctgggatagaagggtcaagttcaagtaaggttgaccatactctactctaggttatttttagtatgattctgtaaaaatgaattaatactaactagtggtgatagcaatgtcagcagtgcctaatttttgtactggaagggctcgtgaagccacagatggagcccttcccgtacaaaaatcaagtaaggttgaccatactctactctagtcagttttattgatagtcttttcagtattattgataatctt

SEQ ID NO: 635 - DNA, 2235 bp, Artificial sequence
  Synthetic sequence
tctaccgggtaggggaggcgcttttcccaaggcagtctggagcatgcgctttagcagccccgctgggcacttggcgctacacaagtggcctctggcctcgcacacattccacatccaccggtaggcgccaaccggctccgttctttggtggccccttcgcgccaccttctactcctcccctagtcaggaagttcccccccgccccgcagctcgcgtcgtgcaggacgtgacaaatggaagtagcacgactcactagtctcgtgcagatggacagcaccgctgagcaatggaagcgggtaggcctttggggcagcggccaatagcagctttgctccttcgctttctgagagcagcggccgggaaggggcggtgcgggaggcggggtgtggggcggtagtgtgggccctgttcctgcccgcgcggtgttccgcattctgcaagcctccggagcgcacgtccgtctcaggggcagcttgcttgttctttttgcagaagctcagaataaacgctcaactttggccgccacccctgtgtcaaaaggggaggaattgatcaaagagaaccctcatcctaaactgtaccctgagggaactgtcaacaatcaccacttcaaatgcacctcagagggcgagggaaagccctacgaagggacccagacccctcgcattaaggtggtcgaaggcggaccactcccttttgcattcgacatcctggctacctccttcccttacggatcgcgcacttttatcaagtacccgaaggggatcccggacttcttcaagcaatccttccctgagggattcacttgggaacgggtcacgacctacgaagatggaggcgtggtgaccgtgcctcaagacactagcctggaagatggctgccttgtctacaacgtgaagatcagaggtgtgaacttcccatccaatggccccgtgcctcagaaaaagactctggggtgggaagccaataccgaacctctctacccagcggacggaggactcgaaggccggtctgaccctgccctgaagctggtcggaggaggacatttgtcgtgtagctttgtgactacgtaccggtcgaagaagccggccaaaaacctgaagatgccgggtatccacgcggtggaccatagactggaacgcctggaggagagcgataacgagatgttcgtcgttcagagggaacacgctgtggcacgatattgcgatctcccgtcgaagcttggtcacaagctcaattaatgaaaaatctgatcttctgaagaaaatatatttctttttattcatagctcttaactagtggtgatagcaatgtcagcagtgccttaactcatagatctaaagccaagtgaagccacagatgttggctttagctctatgagttcaagtaaggttgaccatactctactctagagttgtgttttaatgtatattaatgttactaatgtgtttactagtggtgatagcaatgtcagcagtgccttagagtacaacagttgcccagggtgaagccacagatgcctgggcaaccgttgtactctcaagtaaggttgaccatactctactctaggttatttttagtatgattctgtaaaaatgaattaatactaactagtggtgatagcaatgtcagcagtgcctttgtttagaattatacaggggcgtgaagccacagatggcccctgtatcattctaaacacaagtaaggttgaccatactctactctagtcagttttattgatagtcttttcagtattattgataatcttggggaaaagcttaattaagatccttttccctctgaccagaattatgggaacatcatgaagccccttgagcatctagcttctggctaataaaggaaatttattttcattgcaatagtgtgttggaattttttgtgtctctcactcggaaggacatatgggagggcaaatcatttaaaacatcagaatgagtatttggtttagagtttggcaacatatgcccatatgctggctgccatgaacaaaggttggctataaagaggtcatcagtatatgaaacagccccctgctgtccattccttattccatagaaaagccttgacttgaggttagattttttttatattttgttttgtgttatttttttctttaacatccctaaaattttccttacatgttttactagccagatttttcctcctctcctgactactcccagtcatagctgtccctcttctcttatggagatc

SEQ ID NO: 636 - DNA, 11155 bp, Artificial sequence
  Synthetic sequence
atggacatgagggtccccgctcagctcctggggctcctgctgctctggctcccaggtgccaaatgtgatattcagatgacccaatccccctcctcattgagcgcgtccgtcggagacagagtgaccattacttgtcgcgcctcccaagacgtgaacaccgctgtggcttggtaccagcagaagccgggaaaggcccctaagctgctgatctactctgcctccttcctgtactcgggcgtgccgagccggttcagcgggagccggtcgggaaccgatttcactctgaccatctcgtcactgcaacccgaggactttgccacctactactgccagcagcactacaccactccaccgaccttcggacaaggcaccaaggtcgaaatcaagcgcaccgtggccgcccctagcgtgtttatcttccctccctcggatgagcagcttaagtcaggcaccgcatccgtggtctgcctgctcaacaacttctacccgagggaagccaaagtgcagtggaaagtggacaacgcgctccagtcgggaaactcccaggagtccgtgaccgaacaggactccaaggacagcacttattccctgtcctccactctgacgctgtcaaaggccgactacgagaagcacaaggtctacgcctgcgaagtgacccatcaggggctttcctcgcccgtgactaagagcttcaatcggggcgaatgctgataaggttaatcgagtacgatagccggctaatcagccataccacatttgtagaggttttacttgctttaaaaaacctcccacacctccccctgaacctgaaacataaaatgaatgcaattgttgttgttaacttgtttattgcagcttataatggttacaaataaagcaatagcatcacaaatttcacaaataaagcatttttttcactgcattctagttgtggtttgtccaaactcatcaatgtatcttatcatgtctgatattatccctaatacttgccaccccactcttaatcagtggtggaagaacggtgtcagaactgtttgtttcaattggccatttaagtttagtagtaaaagactggttaatgataacaatgcatcgtaaaaccttcagaaggaaaggagaatgttttgtggaccactttggttttcttttttgcgtgtggcagttttaagttattagtttttaaaatcagtactttttaatggaaacaacttgaccaaaaatttgtcacagaattttgagatccattaaaaaagttaaatgagaaacctgtgtgttcctttggtcaacaccgagacatttaggtgaaagccatgttgactatactgagtcattagggactttccaatgggttttgcccagtacataaggtcaataggggtgaatcaacaggaaagtcccattggagccaagtacactgagtcaatagggactttccattgggttttgcccagtacaaaaggtcaatagggggtgagtcaatgggtttttcccattattggcacgtacataaggtcaataggggtgagtcattgggtttttccagccaatttataaaacgccatgtactttcccaccattgacgtcaatgggctattgaaactaatgcaacgtgacctttaaacggtactttcccatagctgattaatgggaaagtaccgttctcgagccaatacacgtcaatgggaagtgaaagggcagccaaaacgtaacaccgccccggttttcccctggaaattccatattggcacgcattctattggctgagctgcgttctacgtgggtataagaggcgcgaccagcgtcggtaccgtcagatcgcctggagaggccatccacgctgttttgacctccatagtggacaccgggaccgatccagcctccgcggccgggaacggtgcattggaacgcggattccccgtgccaagagtgacgtaagtaccgcctatagagtctataggcccacccccttggcttcttatgcatgctatactgtttttggcttggggtctatacacccccgcttcctcatgttataggtgatggtatagcttagcctataggtgtgggttattgaccattattgaccactcccctattggtgacgatactttccattactaatccataacatggctctttgccacaactctctttattggctatatgccaatacactgtccttcagagactgacacggactctgtatttttacaggatgggttctcatttattatttacaaattcacatatacaacaccaccgtccccagtgcccgcagtttttattaaacataacgtgggatctccacgcgaatctcgggtacgtgttccggacatgggttcttctccggtagcggcggagcttctacatccgagccctgctcccatgcctccagcgactcatggtcgctcggcagctccttgctcctaacagtggaggccagacttaggcacagcacgatgcccaccaccaccagtgtgccgcacaaggccgtggcggtagggtatgtgtctgaaaatgagctcggggagcgggcttgcaccgctgacgcatttgaaagacttaaggcagcggcagaagaagatgcaggcagctgagttgttgtgttctgataagagtcagaggtaactcccgttgcggtgctgttaacggtggagggcagtgtagtctgagcagtactcgttgctgccgcgcgcgccaccagacataatagctgacagactaacagactgttcctttccatgggtcttttctgcagtcaccgtccttgacacgaagtttgctcgagccaccatgggagtgaaggtcctgttcgcactgatttgcatcgccgtggcggaagccgaagtgcaacttgtggaatcggggggaggtttggtgcaacctggaggatcattgagactgtcatgtgcagcctcgggattcaatatcaaggacacttacatccactgggtgcggcaggctccgggaaagggcctggaatgggtggcccggatctaccccaccaacggctacactcgctacgctgactccgtgaagggacgcttcactattagcgcggatacctccaagaacaccgcctacttgcaaatgaactccctccgggccgaggacaccgccgtctactactgctcgcgatgggggggagatggcttctacgcgatggactactggggccaggggacgctcgtcactgtgtcgagcgcatccactaaggggcctagcgtctttccgctggccccgtcctccaagtccacttcgggtggaaccgcggcactggggtgcctcgtgaaggactacttccccgagccggtcaccgtgtcctggaactcgggagccctgacctccggagtgcatactttccctgcggtgctgcagtcctccgggctctactcgctgtcaagcgtggtcaccgtcccgagctcatccctgggtactcagacctacatttgcaacgtgaaccacaaaccttccaacaccaaggtcgacaagaaagtggagcctaagagctgcgacaagacccacacctgtcccccgtgtcccgcccctgagctgctgggcggccccagcgtgttcctcttcccgcctaagccgaaggacactctgatgatctcgagaacccctgaagtgacctgtgtggtggtggatgtgtcccacgaggatccggaagtgaagttcaattggtacgtggacggagtggaagtccataacgccaagaccaagccccgcgaggaacagtacaactcaacttaccgggtggtgtcagtgctgaccgtgctgcaccaagattggctgaacgggaaggagtacaagtgcaaagtctccaacaaggcgctgccggcccccattgaaaagaccatcagcaaggctaagggccagccccgggaaccacaggtctacaccttgcccccttcccgggaggaaatgaccaagaaccaagtgtcgctgacgtgcctggtcaagggcttttatccatctgacatcgccgtggagtgggaaagcaacggccagccggaaaacaactacaagactaccccgcctgtgctggactccgacggctcgttcttcctgtattccaagctcaccgtggataagtccagatggcagcagggcaatgtgttcagctgcagcgtgatgcatgaggccctgcacaaccactacactcagaaatcactgtccctttcccccggaaagtgataaaagcttaattaattgccagccatctgttgtttgcccctcccccgtgccttccttgaccctggaaggtgccactcccactgtcctttcctaataaaatgaggaaattgcatcgcattgtctgagtaggtgtcattctattctggggggtggggtggggcaggacagcaagggggaggattggcaagacaatagcaggcagaaaattttgtgtcgcccttcgctgaacaccaggtgggccgcctactgcgcacgcgcgggtttgcgggcagccgcctgggctgtgggagcagcccgggcagagctctcctgcctctccaccagcccaccccgccgcctgaccgccccctccccaccccccaccccccacccccggaaaacgcgtcgtcccctgggctgggtggtgacccccgtcccgcgaaacaccgggccccgcgcagcgtccgggcctgacaccgctccggcggctcgcctcctatgcgcccccgcgccaccgtcgcccgcccgcccgggcccctgcagccgcccaggtgccagcacggagcgcctggcggcggaacgcagaccccaggcccggcgcacaccggggacgctgagcgttccaggcgggagggaaggcgggcagagatggagagaggaacgggagtcctagaggggcggaaggacgggcggagggacgttaggagggagggagggaggcagggaggcagggaggaacggagggaaagacagagcgacgcagggactgggggcgggcgggagggagccggggaacggggggaggaaggcagggaggaaaagcggtcctcggcctccgggagtagcgggacccccgccctccgggaaaacggtcagcgtccggcgcgggctgagggctgggcccacagccgccgcgccggccggcggggcaccacccattcgccccggttccgtggcccagggagtgggcggtttcctccgggacaaaagaccgggactcgggttgccgtcgggtgttcacccgcgcggttcacagaccgcacatccccaggctgagccctgcaacgcggcgcgaggccgacagccccggccacggaggagccacacgcaggacgacggaggcgtgattttggtttccgcgtggctttgccctccgcaaggcggcctgttgctcaagtctctccggcccccgaaaggctggccatgccgactgtttgctcccggagctctgcgggcacccggaaacatgcagggaagggtgcaagcccggcacggtgccttcgctctccttgccaggttccaaaccggccacactgcagactccccacgttgccgcacgcgggaatccatcgtcaggccatcacgccggggaggcatctcctctctggggtgtcgctctggacttctacgtggaaatgaacgagagccacacgcctgcgtgtgccagaccgtcccggcaacggcgacgcccacaggcattgcctccttcacggagagagggcctggcacactcaagactcccacggaggttcagttccacactccacctaggtttgcatttttagacatttagaagcctatatcttgttacagaattggaattacacaaaaattctaccatattttgaaagcttaggttgttctgaaaaaaacaatatattgttttcctgggtaaactaaaagtcccctcgaggaaaggcccctaaagtgaaacagtgcaaaacgttcaaaaactgtctggcaatacaagttccactttgggacaaatcggctggcagtgaaagggttaagcggccgctcagccttgagcggtatcagctcactcaaaggcggtaatacggttatccacagaatcaggggataacgcaggaaagaacatgtgagcaaaaggccagcaaaaggccaggaaccgtaaaaaggccgcgttgctggcgtttttccataggctccgcccccctgacgagcatcacaaaaatcgacgctcaagtcagaggtggcgaaacccgacaggactataaagataccaggcgtttccccctggaagctccctcgtgcgctctcctgttccgaccctgccgcttaccggatacctgtccgcctttctcccttcgggaagcgtggcgctttctcatagctcacgctgtaggtatctcagttcggtgtaggtcgttcgctccaagctgggctgtgtgcacgaaccccccgttcagcccgaccgctgcgccttatccggtaactatcgtcttgagtccaacccggtaagacacgacttatcgccactggcagcagccactggtaacaggattagcagagcgaggtatgtaggcggtgctacagagttcttgaagtggtgggctaactacggctacactagaagaacagtatttggtatctgcgctctgctgaagccagttaccttcggaaaaagagttggtagctcttgatccggcaaacaaaccaccgctggtagcggtggtttttttgtttgcaagcagcagattacgcgcagaaaaaaaggatctcaagaagatcctttgatcttttctacggggtctgacgctcagtggaacgacgcgcgcgtaactcacgttaagggattttggtcatgagttagaaaaactcatcgagcatcaaatgaaactgcaatttattcatatcaggattatcaataccatatttttgaaaaagccgtttctgtaatgaaggagaaaactcaccgaggcagttccataggatggcaagatcctggtatcggtctgcgattccgactcgtccaacatcaatacaacctattaatttcccctcgtcaaaaataaggttatcaagtgagaaatcaccatgagtgacgactgaatccggtgagaatggcaaaagtttatgcatttctttccagacttgttcaacaggccagccattacgctcgtcatcaaaatcactcgcatcaaccaaaccgttattcattcgtgattgcgcctgagcgaggcgaaatacgcgatcgctgttaaaaggacaattacaaacaggaatcgagtgcaaccggcgcaggaacactgccagcgcatcaacaatattttcacctgaatcaggatattcttctaatacctggaacgctgtttttccggggatcgcagtggtgagtaaccatgcatcatcaggagtacggataaaatgcttgatggtcggaagtggcataaattccgtcagccagtttagtctgaccatctcatctgtaacatcattggcaacgctacctttgccatgtttcagaaacaactctggcgcatcgggcttcccatacaagcgatagattgtcgcacctgattgcccgacattatcgcgagcccatttatacccatataaatcagcatccatgttggaatttaatcgcggcctcgacgtttcccgttggatatggctcattttttacttcctcaccttgtcgtattatactatgccgatatactatgccgatgattaattgtcgacactgcgggggctctggcgcgccttaaccctttgcctgccaatcacgcatgggatacgtcgtggcagtaaaagggcttaaatgccaacgacgcgtcccatacgttgttggcattttaattcttctctctgcagcggcagcatgtgccgccgctgcagagagtttctagcgatgacagcccctctgggcaacgagccgggggggctgtcgctagcgcgagctcacggggacagcccccccccaaagcccccagggatgtaattacgtccctcccccgctagggggcagcagcgagccgcccggggctccgctccggtccggcgctccccccgcatccccgagccggcagcgtgcggggacagcccgggcacggggaaggtggcacgggatcgctttcctctgaacgcttctcgctgctctttgagcctgcagacacctggggggatacggggaaaaagctttaggctgaaagagagatttagaatgacagaatcatagaacggcctgggttgcaaaggagcacagtgctcatccagatccaaccccctgctatgtgcagggtcatcaaccagcagcccaggctgcccagagccacatccagcctggccttgaatgcctgcagggatggggcatccacagcctccttgggcaacctgttcagtgcgtcaccaccctctgggggaaaaactgcctcctcatatccaacccaaacctcccctgtctcagtgtaaagccattcccccttgtcctatcaagggggagtttgctgtgacattgttggtctggggtgacacatgtttgccaattcagtgcatcacggagaggcagatcttggggataaggaagtgcaggacagcatggacgtgggacatgctggtgttgagggctctgggacactctccaagtcacagcgttcagaacagccttaaggataagaagataggatagaaggacaaagagcaagttaaaacccagcatggagaggagcacaaaaaggccacagacactgctggtccctgtgtctgagcctgcatgtttgatggtgtctggatgcaagcagaaggggtggaagtgcttgcctggagagatacagctgggtcagtaggactgggacaggcagctggagaattgccatgtagatgttcatacaatcgtcaaatcatgaaggctggaaaagccctccaagatccccaagaccaaccccaacccacccaccgtgcccactggccatgtccctcagtgccacatccccacagttcttcatcacctccagggacggtgacccccccacctccgtgggcagctgtgccactgcagcaccgctctttggagaaggtaaatcttgctaaatccagcccgaccctcccctggcacaacgtaaggccattatctctcatccaactccaggacggagtcagtgagaatattggtaccggggtgtggtgtcttccagctgcttcatccccgtggcccgttgctcgcgtttgctggcggtgtccccggaagaaatatatttgcatgtctttagttctatgatgacacaaaccccgcccagcgtcttgtcattggcgaaaacacgcagatgcagtcggggcggcgcggtcccaggtccacttcgcatattaaggtgacgcgtgtggcctcgaacacagagcgactctgcagggtggcatggttcgaccattgaactgcatcgtcgccgtgtcccaaaatatggggattggcaagaacggagacttgccctggcctccgctcaggaacgagttcaagtacttccaaagaatgaccacaacctcttcagtggaaggtaaacagaatctggtgattatgggtaggaaaacctggttctccattcctgagaagaatcgacctttaaaggacagaattaatatagttctcagtagagaactcaaagaaccaccacgaggagctcattttcttgccaaaagtttggatgatgccttaagacttattgaacaaccggaattggcaagtaaagtagacatggtttggatagtcggaggcagttctgtttaccaggaagccatgaatcaaccaggccacctcagactctttgtgacaaggatcatgcaggaatttgaaagtgacacgtttttcccagaaattgatttggggaaatataaacttctcccagagtacccaggtgtgttaagtgaggtgcaagaggaaaaaggtatcaagtacaagttcgaggtatatgaaaagaaggattaattagactttgagtgatcttgagcctttcctagttcatcccaccccgccccagagagatctttgtgaaggaaccttacttctgtggtgtgacataattggacaaactacctacagagatttaaagctctaaggtaaatataaaatttttaagtgtataatgtgttaaactactgattctaattgtttgtgtattttagattccaacctatggaactgatgaatgggagcagtggtggaatgcctttaatgaggaaaacctgttttgctcagaagaaatgccatctagtgatgatgaggctactgctgactctcaacattctactcctaacttgtttattgcagcttataatggttacaaataaagcaatagcatcacaaatttcacaaataaagcatttttttcactgcattctagttgtggtttgtccaaactcatcaatgtatcttatcatgtcaaatcgataatatatggtagggttcatagccagagtaacctttttttttaatttttattttattttatttttgagtcgggcgcgccaaaatgaagtgaagttcctatactttctagagaagactactctggagacggtttatcggccaccgaggccaagatctggccgccatatactgagtcattagggactttccaatgggttttgcccagtacataaggtcaataggggtgaatcaacaggaaagtcccattggagccaagtacactgagtcaatagggactttccattgggttttgcccagtacaaaaggtcaatagggggtgagtcaatgggtttttcccattattggcacgtacataaggtcaataggggtgagtcattgggtttttccagccaatttataaaacgccatgtactttcccaccattgacgtcaatgggctattgaaactaatgcaacgtgacctttaaacggtactttcccatagctgattaatgggaaagtaccgttctcgagccaatacacgtcaatgggaagtgaaagggcagccaaaacgtaacaccgccccggttttcccctggaaattccatattggcacgcattctattggctgagctgcgttctacgtgggtataagaggcgcgaccagcgtcggtaccgtcgcagtcttgggtctgaccaccgtagaacgcagagctcctcgctgcagtatcctgcccaagaaagagcgacccgtctcaggggcagcttgcttgttctttttgcagaagctcagaataaacgctcaactttggccgccacc

SEQ ID NO: 637 - DNA, 564 bp, Artificial sequence
  Synthetic sequence
atggttcgaccattgaactgcatcgtcgccgtgtcccaaaatatggggattggcaagaacggagacttgccctggcctccgctcaggaacgagttcaagtacttccaaagaatgaccacaacctcttcagtggaaggtaaacagaatctggtgattatgggtaggaaaacctggttctccattcctgagaagaatcgacctttaaaggacagaattaatatagttctcagtagagaactcaaagaaccaccacgaggagctcattttcttgccaaaagtttggatgatgccttaagacttattgaacaaccggaattggcaagtaaagtagacatggtttggatagtcggaggcagttctgtttaccaggaagccatgaatcaaccaggccacctcagactctttgtgacaaggatcatgcaggaatttgaaagtgacacgtttttcccagaaattgatttggggaaatataaacttctcccagagtacccaggtgtgttaagtgaggtgcaagaggaaaaaggtatcaagtacaagttcgaggtatatgaaaagaaggattaa
